United States Patent Application Publication US 2026/0275333 A1 - sequence listing, part 18

SEQ ID NO: 3045 - RNA, 64444167 nt, Homo sapiens (residues 36,518,364-38,666,502 of 64,444,167)
  source 1..64444167: mol_type = mRNA
cagtctgacagggtttgttaattttattaatcctcttatttttattaatttctcttctctttgggttaattgtattattcccttactaatgtcttaaattggaagctaattcatttttttcagcctgtccttttatataagctttgaagccgatgcatttctctttaactactactttagctgtatctgacaagatctgcaacttccactgtgatttctttgacgactgggttatttagatgtgtaaatctttgtttttatatgggagtttattagttatgttttcattactggtttctaacctatttatattaatgtcaaaaaacatgatctggtggctcatgcctacaatcctagcactttgaaaggctgaggcaggaggatcagttcagcctagaagtttaagaccagcctgggaaacatagcaggacctcttctctatttaaaaaataaataaataaataaaaaattaggccgggcgcagtggttcatgcctgtaatcccagcactttgggaggctgaggcaggcggatcacgaggtcaggagttcgagactagcctggtcaacatcgtgaaacccccatctctactaaaaatacaaaaattagccaggtgtggtggtgcgcgcctgtagtcccagctacttgggagactgaggcaggagaatcgcttgaacccgggaggcagaggttgcagcgagccgagatcgtaccactgcacaccagcccgggcaacagtgcgagactccatctcaaaaaaaaaaaaattagctgggcgtggtggtgcactcctgtagtcctagctacacaggaagctaaggcaggaggattgcgcacgcacagaaggtcaaggctgcagtgagccgtgatggcaccactgcactccagcctgggtgacaagacagagaccctatctcaaaaacaaaacacatgatctgtatgatacccagtcagttctttgtaatttaatttattgtatattttatggccaagaatgtggtcatttttagcaaatgttccatgtgtgagaagtatattttatatgaggtttagagttttctgtctgtgtgcgtgcgtgtgcgtgcgtgcatgtacacacagattttctttttagtcagagtctattcatctattgacagacacttgggttgtttctaccttttggctactgtgagtcaaactgctataaatattggcgtacaagtatctgtttaagtctgttttcaattcttttgggtttatacccagaagtggaattggttgatcatgtggcagatctatgtctcgctttctgaggaaccacccaactattttccacagcagctgcatcattttatattcctaccagtaatgcacagggttccaatctctccacatctttgcaacacttgcttccacttttcttgatagcttttggggtttgtttgtttgtttgtttgttctggagacagggtttcactctgctgcccaggctgaaattaacaatagtgccatcatagctcactgcagccttgaccttctgggctcaagcaatcctcccacctcagcctcctgtgtagctgggactacaggtgtgcaccaccatgcccagtttgtttttttttttttcttttggtagagaagaggtctcactgtgttgcccaggctggtcctgaactcccaggctcaagtggtactccacctcggcctcctaaagttctgggattacaggcaggagccttgatagctatcttaatgggtatgaagtatcattatggttttgatgtgcagttccctgatgactaatgctgttgagatgttgagcatatttactgaacatctatctttggagaactatccttgtacattttaaaactgggtttatctttttgttgttcagttgtagggaattcttatatatatatattcttggcattaaacccttatcagatacatgatttgcagagattttctcccattctgtgcgttggcttcatttcttcatagtgtctttttttctatgagacagagtctcactctgttgcccaggctggagtgcagtggcacaatctcagctcactgcaccctccacctcccaggttcaagtgattctcctgcctcagcacccccgagtagctgcgattaataggcatgcgtcaccagcctagctaatttttgtattcttagtagagacagggtttcaccatgttgggcagactggtctcaaactcctgacctcaagtgatacacccacctcagcctctcaaagggctaggattataggcataagccaccacacccagcttttttcttcatagtgtccttcgatgcataaaaagttttccatttaatgacgtctagtttatctgcttttttttcccttctttatctgctttttttttttccccttctttcattgcttatgcttttggtgtcttaagaaaccattgcaaaatccaaggtcatggagatttggtcttatgttttcatctgagagttttgtttgtttgagacagagtctccctctgttacccaggccggagtgcagtagcgtgatcttggctcactgcaacctctgcctcccgggttcaagtgattctcctgcctcagcctcctgagtagctgggattacaggtgtccaccaccaagcccggctaattttagtatttttagtagagatggggttttgccatgttgaccaggctggtcttgaactgccgacctcaccttggcctcccaaagtgctgggattacaggcatgtgccaccacatctggctattttttgtatttttagtagagacggagttttgccatgttgcccaggttgctctcgaactcctggcctcgagtgatctgcctgccttggcctttgcctttcaaagtgctgggattacaggcgtgagcctccacgttcataaccatgatccctctgatttctcccatccctctgtccccttttagaactctgatagatgcatgttctttctcttccatgcctctgaatctctttttagtagtttttcttttttattacttagtccctacttctgtttctaaaaagataaagtacccaggtgcagtcttatataataattaagactcccttttattcccactcttctttaaactaagccagacacaggtccccactgtctaccctggggagctcattttattccccccagcttaactattcatttaaaattaaagttttattctattcatggggcagctgaagcattttgtacctgaagcctttcagccctcctctccctgtagggctctgctactcaggacaagtcctcagcagggttgaatctctgtacgatctccagggtggccttgtttctatgatggcctgattttcctcctgctctagttccagagcccctgttttatctctttccattgtcttactatctctgctttgagctcttttacatattcttggataaatgttacaattttcatctattccctggcaacaatttctggtaagtattcatgtgccatttgctgttcctgtaatatctttaactcctgtgtcagttcccttttaattactaatttcttaatgaggtgaattctttcttgatgagctcttgtaagtagatcattgtgagagacgggccaggactgtgtcccaggctggcaggaatctgtacgtgggatgggtgcctggaagagttctatcaggattttcttctccacaggcaactacagggctcctcacagtgcaggacctccccacctctgtcattctccttgttgccggctaggttcaggaaagctcttgctgcagtccacactctttcttttttgtttttgagacagggtcttgctctgtcacccaggttggaggaatgcagtggtgccatcatagttcactgcagccttgaaaccctgggttcaaacaatcctcccgccccgccttgcctcctggatagctgggactatgggcatccactaccacacccagctaatttttgaattttttcatagagagagggtttcactttgttgcccaggctggtcttgaactcctgggctcaagtgatcctcctgcctcaagcctcctaaagtactgggattataggtctgagccactatgcccaagcctccttttttaatttcaaataagagattatttcaaataagagattattgggtatgctccttttgtttgtttggtttttgagatggagtcttactctgccacccacgctggagcgtagtgggcgtgatcttggctcactgcaacctccgcctcccaggttcagattctcctatctcagcctcccaaatagctgggattacaggcatgggccaccacgcctggctaattttgtatttttagtagagacagggttttaccaggttggccagactggtctcgaattcctgaccttgtgatccacccgcctcagcctcccccatcttgtttactttgtttgcttttcagtgatttctaagggggttggggatgggtggcactgtctttatgccagcaccttttgtgtgtggtgggggtgggggcaaggtctcactttgtcactcaggctggagtgcaatgctgtcatcacagctcactgcagcctcaacctacctagttcaagtgatcctcccaagtagctggggctacaggcacatgctaccatgcctggcttatttttgtattttctgtagagatggacttttataccccgtggcctaggcctctcaaagtgctcagctgtgccagtactttatgatttttttgaggcagggggtctcactctgtcccccaggctggagtgcagtggcatggtctaagctcaccacagcctctgcctcccaggtagctgggaccacagatgcgcactagcacacccagctaattttttgtatttttggtggagacctcctgcctccctaagtgctgggattacaggcatgagccactatgcccggctgatgccagcactttaaaactagaagtcataatacaagatcaaccttgtattcctgggttaaagagacttctcgattaggatatttattttttacaattcttctgatagatcctatttgcttatactttaagacttctacatttatgttagtgaaagtggtccattcttggcatgtcctatctgctctcagagttcttaaaaccagttgcatcattttccatgtttatttaatctctggaacggaatatataaaaaagggatttcctgttctttgaaagtttttaatacctcagctgtaaaactacttacacctagttcctttttctgagaagagttctgcttcagtttcttaaaaatatttatgagtctaatcagattttttattttgagactgagtctccctctgtcacccaagctggagtgcagtggcgccatcttggctcactgtaacctccacccgctgggttcaaatgattctcctgcctcagcctcctgagtagctgggattacaggcatctgccattatgtccggctaattttcatatatttgtagagacgggatttcatcatgctgcccaggctggtctttaactcctgacctcaggtgatctgcctcagcctcccaaaaagtgctgggattacaggcgtgagccactgtacgcagcctctcttaagaccatgatttatgtttttctggaaaatgttttacatttacactcagttttcatatttgttgccataacatatcctcaggaaatgggatggggttggctttatattgtttgtgtttttctcaatgagaatggattaatgtgtagataaaatgaagaccaccgccatcatgaaataatgagttctaccctaagggagtgtgggaggagattaaaagcatgatgccatcccaccaaaccctgtgctgtgctaaatcagtctttttccaccctctgtttctcagtcttaggaaaagtcctcagtgctgtgggcagtgcccagctactgatgtcccagaaattccagcagttccggggcctctgtgagcaaaacttggtgagtgtgattctccttcctccacagcagggcttccagcctttggctgcccactatactctgccagcccctcgaagcctctgtgccctcctctgtaacacacacagcgcggcttcctcatggtgctggaaggacagtggcaatgtgtgtcagtgtctagcacaagaaagggggcaaaagtggccctatcagatctctaatatctttccatgttgaaacagccacatggatggtaaagtcaattagcactggtttatttatataaaatatattctgtatcggccgggcacagtggctcatgcctgtaattccaacacttgggaggctgaggcgggtggatcacctgaggtccggagttcgagaccagcctgaccaacatggagaaaccctgtctctactaaaaatacaaaattagctgggcgtggtggtgcacacctgtaatcccagctactcgggaggctgaggcaggagaatcgcctgaacccgggagacagaggttgtggtgagccgagatcgtgccactgcactccagcactccagcctgggcaatgacagcgaaactctgtctcaaaaattatatacatatatattttttggccaggcgcagtggctcacgcctgtaatcccagcactttgggaggccgaggcaggcagatcatgaggtcaggagatggagaccctcctggctaacacggtgaaaccccttctgtactaaaaagacaaaaaattagccaggcgtagtggcgggtgcctgtagtcccagctactcgggaggctgaggcaggagaatggtgtgaacccgggaggtggaacttgcagtgagccgagatcgcgtcactgcatccagcctgggtgacagagcgagactccgtctcaaaaaaaaaaaaaaaaaaaaaaaaaaaaaaaaaaaaaacaaagaaatcccactgctgggattggtggcttggctttctccctccctcttacctgttaggagggctggccctgccagggtcaaaagcaaagtcctgggctgttctgcctgtgggaatgtgtgtactcccagcgggaggcagtggagtgagtgtttgtctccaagacctacagagacttgggggttgcgttgtcatggaacagagtgacacgagggaaacaacacagattctgtgacctttcccacctgggagtgaatcgggcttctctcggtgtcactgtcacaccatggccaagaacttctgtttcttccctgcaaaacgagaatacctgtctgctagcatacacatacattagggacaggagtgccttccttgccacagcccttagactatcccccaaagatccccaccactagggctggtgctgaccagaactggcttagattcattcatacagatacttacccagacactaggcctcaagagcccccgcgggtgctggcagggcccagaggaaccctgcttgttggggggttggggggagcaggacaagcctctgctgagctggccccactgatccccatctggcccacagaaccctgatgccaacccacgccccacagcccaggacctggcagggttctgggacctgctacagctgtccatcgaggatatcagcatgaagttcgatgaactctaccacctcaaggccaacagctggcagctggtggagacccccgagaagaggaaggtgagcatggagcagtgcggaggggaagtccagggacaaattcctggtcggcaataacgctgcccacatcggtcagtgctgcttggctcccttctccgtgtgtcgtctttgagctggggtctcacatccatcactgcgtggggtccatgcttggcacttgtctggcatgccgcttgctccgtgtagttgaggctgcccctgaagcatgtgtcctgccctgcatgtccagaaaaggggatcctgggagaggcacgcccacagcctcaatcacgttataacagaggaggcagcaaaaatggtcccttctcctggggccctgctgccaggagtcctggggtctggagccagctctgtgaccttgtggtagccagcctcttccctgaggcttccttctgcaaaccagaaccagtgacccctgttgaaccgtggccctgtctaatcccctagaatagcctgtaaaatgggacctgaagccctaaatttgtctctgactgtgactcgggctagttcctgcccgagtctcgggctcccggtgattcaacatgagggtggacaatgggatctgcccgtccccgctgctcgagcgctctcggagtctaggcttgctttctgctccagtgccttgagctcttcccactgtcagtcatcgcttctcgtggcttcctgattccaagtgtgtgttgcttgtgcccgatgcggggaggctggggtggagactccagctgccggcatatggtgggggtagtgccacacaaaacgtggcacctttattttatttttgttctctcctcactgtctcactaaaggaagagaagaaaccaccccctccggtcccaaagaagccagccaaatccaagccggcagtgagccgcgacaaggcctcagacgccagcgacaagcagcgccaggaggcccgcaagagactcctggcggccaagcgggcagcttctgtgcggcagaactcagccaccgagagcgcagacagcatcgagatttatgtcccggaggcccagaccaggctctgagaccatgcaggaggaaagaaacgattttaaatcattaaaaacacaaaaactaagtgcgaacggaacagagttttctcaacctttgctatggttattctgtctagagaccctgagccaactttcaaattgacgcatacaagggctcacaatttggcttttttgggtccctcccagctttaggttatgaagattttactcacaaaaaaaatcaacaaaaatcacgaaactagaaaactttttttttcctcttgctggccgtggtggactagatagatggacgtcggcaactcccggcccagcctccatactgcggtctttttactcgttctatctgatgagaactcacactagcttgtttacaagatgacgacagtccaagggcagccttgggcacctgccatgtccctcctttccccagctatccccgctctgaccttgattttcattcttatgtttttctcttttcccttcagagctcacacagtggtcaccattgtggcaagcggctttctgggtctcagccctctctgcggttgagggcccagaggacagagagatggacatgcgtcccctccctccccccgccaagtgctcacacacaacctcacgcgcacacacacacacgcagatggaggcgcctcactgggaggtgccccgccagccctgggcagtgtcaggcaggactcactcaccgctgagcagatgagggaagttttagtcttggcgggtggaaatgagacgaagccacagttatcacactccagactcctgcccttttattttctccagccccttcttccttcagcaaaatctaggactcccgagtggcttccagggggccgtcagtcctcagccgcgcctgtgtccggtgcccgaggggcgggcggcggtgtctgtatgtatgtgtacatatgcacatagaccttagagtgtatagttaacaaacgcccatctgctcacccatgcccacccagcgccgccgccgctggctctcggggcacctggcaggaggcgggtgtgtgaatagcatatatttttacatgtactatatctaggtgtgtgtacaagtgtgtgtaaaaatatataccttgtgtgtaagcagccctttttttttttggtctccacccccctccccccgccccgcactcctaagggcccatctgcccagcctctgagttttctgttctattttttttttaaccccaattatccttctctctctcctgcccccgcatcccactcccagggtgtcacgagccctgagctgcaatggcccgggcctgcagggcggggtaggggagggcaggggctgagccccgaagccagctcagtacctgaggggctgctctatgctgtgtatgcgcctctctggcatccgagacatcctcttggctggcgcttgctgcagggggggacccccccccgtccccaggtgaaccaagggtctgctccggggcccatttccagcttggccgccgtctgtgaccttgggcaagtcacttgacctctgtgtgcctcaacttcctcctctgtaaaacggggacagtccctgcccctccctacctcacaggcatgttgtgagaataaatgaggtaacgtgtaccaagggcttgtggcattattgcagggggatgagcagagtgggcccaggaaactgaaccagacccctcccaaaaggcagctctgtggagacagcctgatgggagtgccagccgggatgccagctgtcacatgccagctctgtgatctggggcgggaagatggagctgaccgtcccctctcccgaaaatcagtgtgcagcacttaccagcttcctgtttgaaataaacccttgaaagatagatgctatcacaggagccaggataggctgataaagacgaccctagaggacagtttacaccccccacagatccacagtctgcacattctccagggtggggtactcggtatccccctgcctggcagctgcttccactctgtcaggtgcgagccctgagtgcatctccagagcacctcctctacaggcccagtgctggggcagagctcgctctggtgagggagacagatattgaacgtgacagataaggtcaagtcaatgacaggtggtaaaaaacaagacgcagcagaatgaggctgcaggaccccgcagcgcgaccaccaaacccagcctgggcaggagtgttctggtagagaccagaaggatgagtgggtagccagctttcagggagggagcggcacgcagtcctggcagaagcaggaggtgccaagccccagtggtaggaacataccttttccttttttttttttttttttttttttgagacagtcttgctctgtcacccagactggagtgcagtggcgcgatcttggctcactgcaacctacgcctcctgggttctagcaattctcctgcctcagcctcccgaggctgccattatgcccggctaatttttgtatttttagtagagatgggggtttcaccacgttggccaggctggtcttgaactcctgacctcaggatcagcccccattggcctcccaaagtgctgggattacaggcgtgagccaccgcacccggccggaacatgccttttagaaagttctctggccaggctctggagccacagactcctggtctcctcccttggcccaagccagccaagaagctcgtgatctcaggcccaggggatgcacggaccctgccttcccagcagctttgttcaggctacctcgcccaccccagcgagccccctgggagcccatccgaactgtggccagacccctgtgcttggagcagcccttgaccccggatcccaacacacctgttagtggtgacagagcatctggtgaccacaggtggcttggattaactccagggctggcaccttcccagacctacccctaccctgagacccagctgggggtgacttgaagggtaagtgaagaggtttccagttgcatcaggcattgaagcagacgttcaggggtgcagctagcagccggctctcccggatgggccatggggattggggatggacccttagccttcctgcttctgctgtggcaggggaagggacttgagggttagattagggtctcaggagggatcctgcactctattaagcacaagatggggtaggggtgtctgatgtacagaatctggacccccacgcccagccctcctggcacagcagtggagaagacgccacctccattgaagggacagtataataatgaacacatatctcgcggccagagtcaccgattactgatatttcacccatatgagcattatccctctcggatacatacacatcgttttccccgcgagccatctgagagtcagtggcatacactgatacttcaccccaaaacacatcatgcaattcccaggcacgaggacgttcctgcacaaccacaataccatcaccaccctcaaacttaagaaaggaatgttccagggagcacctccttttatatgaatatggcctaaagcacagcccatacgccaggtgccctcacaaccttgtcccttataccttctcccttttatccatccagggtcccattaaggatcagtcactgctttcagttaccatgtctgtctggttttgttttgttttgttttttcttttcttttttagacagggtgtcactctgctgcccaggctgaagtgcaaagaatggtgtgatcacggctcactgcagcctcaaccaactgggctcaatcaatcctcctgcctcagcctcccaagtagctgggaccacaggtacatgccaccatgcccagctaattttaaaattttttgtagagatggagtctcactttgttgcccaggctggtctcaaactcgtgggctcaagtgattctcccgccttggcctcccaaagtgctgggatcacaggtgtgagccaccatgccaggccaccacgtccttctagtctctttaaaaatcaaaatttccctactttttgggttttgtttttcgagatgttgatggcgttttgttttttgttttgtttgttttagtttattttgtttgttttgagacggagtctcactgcaacacccaggctggagtgcagtggcgcgatcttggctcacagcaacctccgcctcctggcttcaagagattctcctgcctcagcctcccaagtagctggggactataggcgcccgccaccacacctggctaatttttgtatttttagtagagatggggtttcaccatattggccaggctggttttgaactcctgacctcacgtgatcctcccaccttggcctcccaaagtgctgggattacaggcatgagccaccgcgcccagctgagatgttggtgtttttaaagtatccaagcgcactctacagaatggtgcactatttgggtttacgttttctcatggccggattcagattaaatggttttcacaaaaatatgacttagatgatgtcccatgtccttgtatcttgttccatcaaggatgcatttgtcacttcagagaaaggctgacagcagcttcccagagaagctgggaatgagtcctcagcttctgtgtttccaaagcctagtccttgagggaaccaggacagggacagacaggaagtgccctcctaaaggctgcaggatatgaccacagaggcagcagaggggacaggagactgtcagccacctgtgggtccctgagaaccctacatggcccaggtttcccttctagaactccaagctccctaggtttacatgtttccggagtcagcagagaaggctcagctaccgccaggaacagcactgggcccccagaccttatagacaggacagcaggacaaagccactgccaccaggagcctgagggccaagtaccaagcggaggctgcgtgggcaaatgctgtggaggacagacccactgagatgaggtttctagcaccagcagtggaatgggctttacaacagcaattctaaacagtctcctgcccatctgaatctgtggctgatctgaaagctggtgtggtttctgctgccgaccctggtcctaccatatggcggccaggggaattttcaaaatgctaactgggctgcatcaccctctgcttaagacccctaaacccaggccgggcacggtggctggctcacgcctgtaatcccagcactttgggaggccaaggcgggtggatcacaaggtcaggaggtcgagaccatcctggctaacacggtgaaaccccgtctctactaaaaatacaaaaaaattagcagggcatggtagtgggcacctgtagtcccagctactcgggaggctgaggcaggagaatggcatgaacctgggaggcggagcttgcagtgagccaagatcgtgccactgcactccagcctgggtgacagagcgagactctgtctcaaaaaataaaaataaaaataaaaaccgaaccctaaacccagtctcctcaccttggccttggaggctgccacccacctctatagccacacctccaagtgagagctgcccttggccgcctcagggcctcccacagggtgtcccgggcctccaccgatgcagctgacatcagctcttgcctccactctcagggcaggtggcctttccccagggaaatctcgccaagcacctgggccaggccaggtcggtgccaacgccctgctctacacctggagcacaagagtcgcttccctttgctgttgtcactgatgtgatgatgcttttattaatatctatgtgatgacttgtgaatatctgtctctacgcagaagatggtgggctcccaagggtaggaagagagttttttcaccaggtctcagtgcctggcagagagtagagcctcaagaatgatttcctaaatgaagaaccttggcagagaaggcaatatttgctgggctttcagaatgggcaatatttgaaccaagctatggcagtaaaagacacagtgagcacagtggcagaggtgtaaggctgtgctgctgctccaggcggggctggggccagactggccttgaatgccaggttaacaagtaaggctttcaggccagacacggtggctcatgcctgtaatcccagaactttgggagaccgaggtgggtgaatcacttgaggccaggagttcaagaccatcctggccaacatggaaaaaccccatctctacttaaaaaaataaaaaattagccaggtgtggtgatgcatgcctgtaatcccagctactcaggaggctgaagcaggagaatcacttgagcctgagaagcggaggttgcagtgagccgagatcacaccactgtactccagcctgggcaacagagcgaggctcagtctaaaaaaaaaagaagtaacgctttcgggggcagttttaaatggagcagggacatttcttgccacagaaccccacttcccataaaacagggtcccccggtaccagcctcgatagacccatggtactctctggacccagtgagtccatactttgtctccaaaatgtcaccctagcccagacccagtgaagcccccgtggccaacacaggacatgggcctttggggcccctctgctgcctttatggctttaactttctgtagactgacaactcccgcatctaaatctccagcctgtatttttccctgaactccacccttcccactcgacatctccacctggatgcataacaagcaactcacacatccatcaactcctaacagtagagggaattcaggaattagaaaatcataatttgggccgggcacagtggctcatgcctataatcccagcactttgggaggccaaggcgggtggatcacttgaggttagcagttcgagaccagcctggccaacatggtgaagctccgtctctactaaaaatacaaaaattagccaggcgtggtggctcatgcctgtaatcccagctacttgggaggcagaggcaggagaatcacttgaacccaggaggcggaggttgcagcgagccgagatcccaccactgcactccagcctgggcaacagagtgaaactaggtctcaaaagaaaagaaccatttggcaaccatcatattgtaataatggaagcatccatgcatgttaaaagtactggtggctgggtgcggtggctcatgcgtgtaatcccagcacttagggaggccaaggcaggtagatcacctgaggtcaagagttcaagaccagcctggccagcatggtgaaaccccgtctccactaaaagtacaaaaattagctgggcgtggtggcacgcacctgtaatcccagctacatgggaggctgaggcagaagggttgtgccaggatcgccaatgaactgtactccaactgggtgacagagcaagactctgtctcaaaaaaaaaactattggttgaaatttttattaggaacagaatattcacaatcccaaagtagcacaccacatattacttattttccactgttcacggattggaagacttagttttggtaagatggcaatactcccccaaattaatctacaggtttgacacaacccttatcaaaatcccagctcccttttctgcagaaattgagacactgaccctaaaattcatatggaaatgtaaaatttactacaaaactaatgtaatcaaggctgggcacagtggctcatgcctataatcccaacactttgggaggctgggacaggagggtcacttcagcccaagagtttgagaccagctttggcaacacagtgagattccatctgtacaaaaaatacaaaaattaaccaggtatggtggcacacgcctatagttccagctactcaggaggctgaaacacaaggatcgcttgagcccaggaggttgagactgcagtgagctgtgatcataccactgtagtccagactgggtgacagagcaagaccctgtctcaaaaaataaataattaattaacaaataatcaagattgtgtagtactggcaaaagggtagacatatatatcaatgaaacagaattaagagtccaaaataaacccatacattaatggacaactgactttagacaacagtgccaaggtattcaatggggaaagaagtatcaacaaatggtgctaatgtaactggatatccaaatgcaaaaaaaaggaagctggacccttaccttgcaacatatacaaaattaactcagtatggattaaagacctgaaaactccatcctggctaacacggtgaaaccccgtctctactaaaagtacaaaaaattagctgagtgtggtggtgggcacctgtagtcccagctactcaggaggctgaggcaggagaatggcgtgaacccaggaggcagagcttgcagtgagccgagatcgcgtcactgcactccagcctgggcgacaaagcaagactccgtctcaaaaacaaacaaacaaacaaaaaaaaaaaaacaaacaaaaaaaaccatgaaagctaaaactagcaaactcttacaagaaaacagaagtgggccgggcacggtggctcatgcctgtaatcccagcactttgggaggccaaggtgggtggatcatgaggtcaggagatcgagaccatcctggctaacacggtgaaaccccgtctctattaaaaatacaaaaaattagccggacgtggtggtgggcacctgtagtcccagctactgggaaggctgaggcaggacaatggcgtgaacctgggaggcggagcttgcagtgagcccagatcacaccactgcactccagcctgggcgacagagcgagactccatctcaaaaaaaaaaaaaaaaaaaagaaaagaaaagaaaacacaagtgtaaacattcataaccttggatcaggcaatgacttcttgggtatgacaccaaagcacaagcaaccaaagaaaacacagataaactaaacttaaaagttaaaaacacttgtgcttcggccgggcgcggtggctcatgcctgtaatcccagcactttgggaggccgaggccagtggatcatgaggtcaggagttcaagaccagcctgaccaagatagtgaaaccttgtctctactaaaaatacaaaaattagccaggtgtggtggtgggtgcctgtaatcccagctactcgggaggctgacgcaggagaatcacttgaacccaggggtcagagattgcagtgagccgagatcgcaccactgcacttctagcctgagcgacaaagcaaaactccatctcaaaaaacaaaaaaaaaataaaaaataaaaaataaacttgtgtttcaaagaacacatgtttatcaagaaagtgaaaggataactcacataataagagaaaatatttgcaactcatttatctgataagggtgcaatagccggaatatgtaaagaacttctacagctcaaaaccaaaagacaaatttttaaataggtaaaaggatctaaatagacacttttttttttttttctttttttttttttgagacagagtctcactctctgttgcccaggctggagtgcaggggcatgacctcagctcactgcaaactccaccttccgagttcaagtgattcttgtgcttcagcctcccgagtagctgagactacaggcacccaccaccacccccagctaatttttgtatttttagtagagacggagtttcgccatttttgccaggctggtctcaaactcctgacctcgggtgatctgcctgccttggcctcccaaagtgctgggattacaggcgtgagccaccaccgcggccagcctaaatagataattctctgaagaagatacacaaatgtccaataataagcatgtgaaaaatgctcaacatcttcagtcactagataaatgcaaatcaaaaccacaatgagatgccacttcacacctaatagcatgactagaattaaaaagacaagcagggccaggtagctgtagtcccagctactcgggaggctgaggtggaaggactgctaagcccaggagttcaagtccagcctggggtaacatagtgagaccctggctctaatacaaacacagacagacaagtattagtgaagaagtagagaaactggaaccatccactgccggtgggaattcaaaatgggacaacattgtgcaaaattgtttggaagttccttaaaaggttaaacatagaggcgttaccatatgacccagcggttccactcttatatacctgagaaagtgaaaacgtatatccacacgtaaacctgcagattaatgttcacggcaccatattcataatggacaaaaagtagaaacaacccaaatgtctatcagctgacaaatgcaaaaacaaaatgtagcatatagccatacaacagaatactacttggcaatgaaaaagactgaggtcccgggacattctgcaatatggatgatccctgaaaatattatgctaagcgaaagaagccagacattgtatgactgcatttgtttgaagtttctagagtaaacaagctggctaggcgtgtggctcacacctgtaatcccagcactctgggaggctgaggcaggtgaatcacttgaggtcaggatttcgagaccggcctagacaacatggtaaaaccccatctctactaaaaatacaaaaattagctggggtggtagcaggtgcctgtaatcccagctactagggaggctgaggcaggataatcacttgaattcaagaggcagaggttgcagtgagccccactgcactcccgtctgggtgacagggtgaaactccatctcaaaacacaaaaacaaatttctacagtaaacaaactgatagagagggaaagtagatccatagtctccaggggctgggatgagaggagaatgggaaatgactgctgacaggtacagggtttctttgggggattacttactaaaatgttatggaattacatagtagtgccgataattacatagctttgtagatacactaaaaccaatgaattgtacatttcataggtgaattttatggtttataaaagataacaatttaagcttttctttaaaatacagaaaacctgtagaataagaaaaatatttacaaatcatatcaagggattaatatccaaaacatatttttaaaacgcctagaatcaaaaaaaaaacaaccctgctcttttaaatgggccaagaattttttttttttttttttgagaccgagtctcactctgtccaccaggctggagtgcagcggcgcgatctcggctcactgtaacctcagcctcccggattcaagtgagtctcctgcctcagcctcccgagtagttgggattacaggcgtgtacaaccacacctggctaatttttgtatttttcgtagagaacaagatttcaccatgctggccaggcttgtctcaaattcctggcatcaagtgatccacctgtctaggcctcccaaagtgctaggattacaggcaagagcaaccacaccaggccccttgtacactgttgatgggaatttaaaatggtacagccactacagaaaacagttattgcagttcctcggaatgttaaaaatagaataaccatttgatccagcaattccatttctgggcacatacccaaaagaattgaaaacagagacttatatgttcacaatgtcaggttaaaaaaacaatagcaggaacttgaagagacccatgttcactgaagcattattcagaatagccaaaaagtggaagcaacccaagtgtccatccatgatgagtagataaacaaactatgcaaacaatggaatattattcagccttaaaaaggacgagagcctgggcaacatggcaaaatcccacttctacaaaaagaattttttaaaaaattagccggggccaagcacagtggctcaggcctataatcccagcactttgggaggtccaggcaggacgactgcttgaggctagaagtttgagaccaggctgggcaacacagggagaccctgtttctacaaaagtagaaaacttagccaggtgtgggccgggcgcagtggctcacatctgtaatcccagcactttgggaggctgaggcgggcagataatgaggtcaggagatcgagaccatcctgactaacacggtgaaaccccgtctctactaaacatacaaaaaaaaaaaattagccgggcatggtggcgggcgcctgtagtcccagctactcggaaggctgaggcaggagaatggcatgaacccgggaggcagagcttgcagtgagccgagatcgcgccactggactccagcctgggtgacagagcgagactccgtttcaaaaaaaaaaaagaaaacttagccgggtgtgctggtgcatgcttgcagccctagctacttgagggggtcaaagcagggggattgcttgagcccaggaggtcaaggctgcagtgagctataattgtgccactgcatgccacccacggcgacagagtgagaccctatctcaaccccccacccccaaaaagaaattctgatatacactaaacatggatgaacctggggcttgaggacattatgctgggtgaaataagccagtgacaaaaggtcgaatgctatatgattccacttacatgaggccccaataagtagataaactcacagaaaacagaaagatgaatgatgactgccaggggcggggagaagggggcaaggtggagttagtgtttaactggcagggagtttcggctgaggaagatgaaagtgctctggagatggatggtggtgatggttgcaaaacaaagtgaatatacttaatgccaccaaactatacacttaaaaatgctgaaaatggcatgaacctgggaggcggagcttgcagtcagctgagatggcgccactgcactccagcctgggcgacagagggagactccatctcaaaaaaaaaaaaaaaaaaaaaaacacgctgaaaatggtaattttatgttatgtatattttaccacaatcaaaaaataaaatgtaaaactgggacactgaagaaatgtgatgacaaatgatcttactttggctcctagaccagaaaaaattcctctaaaggacattattgggataactggcacaacctgaatatggactgtaaattaggtaattaaatcaatgtgaaaattgtcctgacttttatcattgtactatgcatatttaagagaatctcctttttaggaggtactcactgaaacatgtagagataacaggacatacgtatgcaagaaactctcaaatggttgggggtaggaataaataaatataaatgtatgtacatgtattatatatatgtatatgtatatggaaagcaagaagaaaatataataaaacccaatggtaacaaatggagaatctagatgaagctatacagggttctttgcacagttcttctaactttatcctaagtctgaaatcatttcaaaataaagtttttaaaaattaatctgtccaaaatagagtttcttatccccaaactgctccacacagcaaacccatcatagaaaatggcagctctttctcgttgctcacatcaaaactctgagagtccaccctaactcttttctttcacacccattcccatgccccagcagatcctaccggctgcacctcggaaatagttttagcacttgtccctcggcctccccgctagtccggatcagcctgatccttgctgggtcgctcctcacaggtcccctgctcgtggactcggccccctctgcgctattttcaacacatcacccagaaggattccgtcaaaacccaagccaggtcgtcaccccctgctcggaaccctccgacaccccacatggcctacagggagccacagaggggtccctgctgcttctcagcccctccggctcccgcccccatcctcctgacctcctgctgccggcgaccccaagcccgggagccctcacggcggggcgcacccctgcacctcctgtctgcccaatgtcactgcccagagcaccctgcggaacagcccacgctccccccaggtccccttctcctttgaggccccaggccgcggagctacttgttcatcgtgtttccctccacgaaaccagtgcttcccgagtggttccttcaaccccgctctggcgggcgaccgctgatgtggacagagcgagtcaccgggcgtaggggtccctgggagcccccccacccaccgcctctgccctccccacgtcgagagccgttgcccgtcaggggaagctgcactcccacggcccatacaagtgggaggcctctggggaagcggccctggacattccgtttgcctctctggaggggaaggggtggcccagagcgaacccccacaccccctctcccattgcctgctcaccccatcacctcccctccctacaaggccctctgtgcagcccgggctggcacagcaaggaaggggggctcaccccagagcgcccccgcctgccagcccgtgggtcgaggccaaataaggccggacggcagccgagggcccccgcaccccgcccgcggccccgccccgcgcacattcttctgccttgtaaggcccggccgccacgccccgcccccgcctggagtccagacccgacggccggcccagttccacgcacccagcgagcccaagcgccttctccgcaccaggtgggatccggggccccgggggtcttgaggacaggcctaacggcccagggctggagatgagaggtggcccgggcccgacccggctgtcacggggggcaaaggcgggccccacggactgggacgtggtagggtctgttgggcacggactgaggggtgagctggggcagcgagtttgctgggggccgacagggactctggccaggggccgggcagcaggaaggctgttctggcctctgagaagcagtggtcctgcggcaagggaaggccatcgtccaggccctgcccctttgctgaggagctggagatgccaagcccagagctccggggggggctggggagcccgggtacaagggtgctggggagagggttgcagtcgtcagttccccctggcccagtaaaggcatgtgtgtcacagatggagaaacagccctgtgggactccacgcccccacagcatctgtgtcccctccccatctcccatccctacaccctgggccaggggaaagggaccgagaccagggggcccttccgacacagccagtgctgtatgcagggacccgggccttcccctctctgggtcatctcgcctgtgggtggggaaggtctgcggagggccctgatggactcacccctagggggcaggacgaggactagtggctgggagaacctgatccctgctcttcccagccctccagctgctctaaggaggagactcagatgaggtgcactgagaaggaggcatctggcctgcccagctccaggggctggaggtcatgggggcactgccctgtgctggcttcagcccagccttttctgttatggtgggaatctggacaccaggatgggggacatggcatccagtcacatccaggccaagtatcagtgctgacccctggtgtctagggcacctgaagggggaagcgatggcctcagaactaaaggccccacccatgcctgcccctcgcccctccaccagttctagaaggcgcctctggatacacagagccctttcccactccactgccacaggcccgcctgaggactggggctccctgttttgttcaagcctcgagggcaccagcagccaagtttgctctccactgacccaaacctagcccaggaatcctgtcttccaggtggcccctccccctctcatgggcactccactccccttctggggcctcttttcctagctgcaccatgggggcacccctgcctccgctcaccacttcccacaattgctggggtggacatggcggccttgtgcaagcccttaagtacagtgctcccagccacaccacagcagagagtgcagaccgggtggccatgaaggcagaggggcccagctgggctcagacccagctgtgggtggcctggccatgcctgccctagagcttcatagagtgtggtggggacagtgatggccatcacagcctctgttgggcacagtgcactgcctctctgcatgcagccttctgtgggcaccaggagtcaaagttcccgagaacactggactcagggaaggactaggcccctctaaagcacgggagaggagggggccggcatctggggacaatggcactcccaactaggtcatgggtgagaaggaattctgtctaccttcctgaaccatgcaagaaacactgagggctgggtgtgtcggtccgtgggacacgggcaaccactgtctcatgactacaggcagtgatggccctggggaccagctggggctggccgggatcccagtccagggttgatgatctcaaaggccaaggaccgagaatgacttcaacagagtcatgggaggaaggcctggaaacagctcaagttgcaaccacacagcttggggtgaacaacaggcagaggaggcttcctggaggccctgggcccgggggtttgggcagagggaagaggggccgcagtcctggaacctcagccaggcccactgccccagccgagggaaggaggcactgggtcttcaggcgcatatccccacaagctgtggcaagcattcagggaaacagtcccaggcctggtctcagtttccccatctgtacagtagaagcagcagactggccgtagttgccttcatatagtcattcatcaaacaagcatctgttagcccaactatggcctgggattggtgtaaactgggggatctatgctggcccacaagggagagagatctttaagtgtttactgtggaagcaagggtacagggaacagctccctaggagaggggggcggtctcaagaactgggctggagaagaaagagcacaggggaggaggggaccacagaggaaagcctgggagtgtccagggaactgcagaggtcagaagggtaggattgtgggtcacaagagggacaccacgagggctgtcagagaggccaggagggactcacacagggccttgaatgccaggatgagggacccagacttgctctgaggggcggcaggaaccttcaagggcttcacaatgataggtgtaggtcagggtctgtatgggacagaagaggccggctggaggctaagaagccaggtctaagcaagggtgaagaagctggggttctcagcccaagcaagcctcacaccccgataagcagtggggagtgagaacaaggagtgggacccaggatcagtctgtgaccactcaccactggggggctggtcaagctccctgaggtggacaggcgggggtttgactgcccagagcctcctagaacctcaggcgggcagcagagggatggagtgggagagtgaggaacggcaggaatgcaggaatgctgatccagctccttcctgcagggccagggagcctggatggcagcccaggagagccctcactgactcccacgagtggacccaccttgtcacttggaaagagagagggacagtgtaaatgctattaaggattaaaggagataaagcatggtaatggttggcaccaagcccaatcctaagtgttttacccaaacagtcacagccaaaatagctgattccatgcccggcactgttccaggagctctcgggcactgagtcagttaatccctactgctgggcactcctcatgtctccagtcccagatgaagactctcgggctcagagaggtagaggaagttgttcagaatcacacagccacacttgtctgcttttgtgaagaactgggtggtgggagccccaaatccgtgggcagccttgaatgccaggccgaagtgctaaaagccagtctgggggaggcaggaagattccctggcccagagtcacagggccacccaacccccaccccttcctgcagggaagccccacccaccagaagccaagatgtccagcaagcgggccaaagccaagaccaccaagaagcggccacagcgggccacatccaatgtcttcgcaatgtttgaccagtcccagatccaggagtttaaggaggctttcaacatgattgaccagaaccgtgatggcttcattgacaaggaggacctgcacgacatgctggcctcgctgggtgagctgggacagggacaggggtgagatggatgaggccaggcaggctctgccaatcatttacagggcacctcctgtgtagtgagacgcgtggtgtccaccttagagaatagttgccattaacttagtccattcaacagggaaactgggccgggcgcggtggctcacgcctgtaatcccagcactttgggaggccaaggcgggcggatcaataggtcaggagatcgagaccatcctggctaacacggtgaaaccctgactctactaaaaataccaaaaattagccgagcgtggtggcgggcgcctgtagtcccagctacttgggaggctgaggcaggagaatggcgtgaacccggaaagcggaggttgcagtgagccgagatcgccccactgcactccagcctgggcaacagagcgagactccatctcaaaaaaaaaaaaaaaaacagggaaactgaagcacaaagcaggtccaccacagggtctgaacgtagacaggctgactccacagtgggcctgtcttaggcagatttgtgcactgggctgccaggtatcatttcatttaaagaaaggggtcagctggccaggcgctgtggctcacgcctgtaatcccagcattttgggaggccaaggcgggcggatcacgaggtcagaagatcgagatcatcctggctaacatggtgaaaccccgtctctactaaaaatacaaaaattagctgggcgtggtggcgggcgccagctactcgggaggctgaggcaggagaatggtgtgaacctgggaggcggagtttgcagtgagccaagatcacgccactgcactccagcctgggcgacagagcaagactccgtctcaaaacagaaagaaaggaaagaaagaggtcagcatctaaatgaaagtgtgaactgcaggctgcccactgcacagatggggaaactgaggcctagaggggcggccagaccagctcccctccttcagaggtcacccatctcaggctctcatagcctctctggtcccagtgacttcctcaggatcaggaccttagaactaacagggtacaaaaatcaagtccaattctctactgcagatggggaaacacaggcccagaggcaaggcctccacagaccatgccccaacccacgggcctgccccaacatccctcccaaagtgctggccacagccagccactctcagcccagttcccgcgtacccctcatgccgagtgacagcatccagaccagacactgcctgggggagggagagtccaggaccagaggacacagccccgtgacagtcaagcctcgagctttgaggccagagagtcagtccctggtagggccctgtgcactttcctcttcctgtgaaatggggccatgaccctgacatttccccacgaggcactgagcaggagaaccaggcaaacctgagtgggagaactgacagcacgctgcccccggccctgagcaccaaacctctccccgcttctggccaggctcgcttgaaggctccctcccccaggaggtcacctggcaggaagtaaactccagggttctttttttttccccccgagacaaaatctcactctgttgcccaggctggagtggcaccatctcggctcactgcaacctccgtctcccaggttcaagagattctcctgcctcagcctccccagtagctgggattacagacgtgcgccaccatgcccggctaatttttgtatttttagtagagacagggtttcgccatgttggccaggctggtctcaaactccagagcccatcttggcctcccaaagtactgggattacaggtgtgagctaccacgcctggccaactccagggttcttatctggggctttcccagcttcgtggaaggactgaggcctggtgagagaaggggctggccttaagtaccccagtgtcctggcgtcacagctcctcttgggcctcagcttccatggccatcccagggggacacagcagggtatgtgaggctcagggacatgaaaacttcctatttccaaggccacaccctgcacccaggcccctgaacccctgagacttcatgacagccctgggtgtccacccagaaaaacatgcactgtgtttgtagctcatatccgtgggtctgcaggtgagtcacacccttatcttcaagttaaaaacaagagcagcaaatataataataagaagaagccctgcaggtattatcttaaatctcaaagcaatcctattgaacagatacaattattcccactttacaaacaaggaaactgaggctcagagaggttaagtaatttacccaaggtcacacagctaccaagtagtggggctgcaatagaaacccagcagttgattccagtccataggcctgtgccagtcattgttatgagccttttgcaactactgtcttcacaattcccctaagagatggggaaaaccaaggtgcacagctgggatccaaacccaggcctgtctgacagcaaagcactgtgtctggactttggagttaggctgcctgggttcaaatgccaggtctactcaagtctcctccttacttgctgtctgaccctggacaagtcacctggcctctctgtgcctcagcttccatacctgtgaagtgggtaagaatgctgacttcacagggtggtgaaagttaaatgcaataaggcacgtggtcgaccagccacagcgagcagtctgcagagggttgttcttattacactttagtgagcactgccggctgctgacatccaggccacaggaggaaactggtgggagcagccagggactccgggcgcccactgctgtggctgcgctagagccatgctttccagttcacaaaacccactacctcccgtctcacacggagcggtgaagggcaggggtgggggacgggggtgcaagttgtcccagctggggacagagggcccaggaccacaggctggaacaccccacctgccacagggaagaaccccacagacgaatacctggagggcatgatgagcgaggccccggggcccatcaacttcaccatgttcctcaccatgtttggggagaagctgaacggcacggaccccgaggatgtgattcgcaacgcctttgcctgcttcgacgaggaagcctcaggtccgtggcgccccctaccaccactctgcatgcaagtggaacagggcccaggcattcagtgcctctgcccctaagggccagaacagacatcacccatctcccaggttctgtcaccagaactataaaagccaggccacctccttattgtcgccgcaaaggctaggccagaacagcccatgccccaagactcctgccttcgtgatctcccccgctggcccaatgcacattctccatctgttttagacctttccagaaatcaaaccatttcatgcctttcttgccaagaaggtatagaaactggcccccctcctcggatctcctaacggatattccatccctcagctcatttttcccagggacatgtcagggtgatgatggccatggtaacatggccatgggcccgcacgggcctgactaccttcacggtccctcactgcaatggcatacgttcatccctgttttctagattaaacaggcacacggaggttaaggaccttgcccaaagtcacatagctagggagaatgggaatcagcactgcaactcaggcagtggaactccagagctcacgcttaaaacagggcacacccaacaccatctgtgtgcacagcctcaagttccccaagtgacacctcggagacagtcccactgcacaactcctcccctcaggaccctggcaccccttcacgtgggatccgacaccccttcacgtgcacccccacacccctcctgccacgtcctcattcctcagactgaccagagactaagattgtatcttcccagcccctctaggtctgcaagagctgccagggggctgagggatggggctgctgtgtatgtctcagcccaagttcctgctctcacccaccctgcccctgcccgcaggtttcatccatgaggaccacctccgggagctgctcaccaccatgggtgaccgcttcacagatgaggaagtggacgagatgtaccgggaggcacccattgataagaaaggcaacttcaactacgtggagttcacccgcatcctcaaacatggcgccaaggataaagacgactaggccaccccagccccctgacaccccagcccccgccagtcacccctccccgcacacacccgtccataccagctccctgcccatgaccctcgctcagggatccccctttgaggggttagggtcccagttcccagtggaagaaacaggccaggagaagtgcgtgccgagctgaggcagatgttcccacagtgaccccagagccctgggctatagtctctgacccctccaaggaaagaccaccttctggggacatgggctggagggcaggacctagaggcaccaagggaaggccccattccggggctgttccccgaggaggaagggaaggggctctgtgtgccccccaggaggaagaggccctgagtcctgggatcagacaccccttcacgtgtatccccacacaaatgcaagctcaccaaggtcccctctcagtccccttccctacaccctgaccggccactgccgcacacccacccagagcacgccacccgccatgggagtgtgctcaggagtcgcgggcagcgtggacatctgtcccagagggggcagaatctccaatagaggactgagcactgcttctggtctgtgtgtctgtggctggggtgaagtaaggggaccccgggcctgaaaccctctcccaccttctcctgccatctccagttactgccctgctcctcccaccctggcccagggaaggactgggtgtcctccggccatatggtccctgaagcctctagggaccagagtccctagtaagtgggctctgtgctcagctgagaccagcaggggacaggggacggagggaatgggcctcatggccttctcagggcttgtgggaaagggaggaccatgggaatcaccacagccaatcccgtggagggttccaggcctcttggggggcagaggtcaggccacacagccctcaggactaaagctccgggttccagaagaacagggaggctccaacagtgatgaggcaggcgtcccagcagctcagggttggaggtgggaatgaggggtttcccagccccaggcaggtggagggcgagttcagccccaggaccaacagcatgggggccacagctttccatgtccctgtgtacgcagggcaggcagggccgggacccctgctactggtggatgatggggacactgatggcagtgcctggggcctaagaggggcagaaagagcgctgaatgactgagcagagagtccagaggggcatggactgcctgggtcacccaataggcctagggaagagtgagggccggacccaccccacctgaccccagcgagtggacccagcttggtcctgaggccttctccagaggtcacccagcgcaggcagccgcagcactcagcaaaggtcccagatcagggccaagggggagctgagcaccaggggaccctgtgcctgaccaggaggccctaacctcctgcaggcctcaacgccaggccctgctcagagctcggctgaaactcctcatcctggctccaaacagaggcccaaaagtccctggtatcaactccagaaggggcgagacccgaacaagttccaaaccaggcccaaatagtatcccaaactcagtcccaaacacattctcacccccggcagcaggctgcaggcctccagctacacacacggccctgggcaactctcagtctggccacccattcgatgctgccagccccaagggtgtgggaggggggtctcagagtgtcccagggtactggccacacatgcccgacaccagggtcataaggtcctctcagcagagccactgcagcaccaaaggcatttctggaaggaggcaaggacgcgtcatctagatgtcaagccccagcgtgcgattctgtcacagttcaccccaccttcaccccgagacggaagacggaagagcttcgcacacaggcgggaagaggtcaggaccagtccagcctcactggcttcagaactggcctgggggctaccttgacccacaggaagggaagaggaacgtgctctgggcagggcaaggcaggacctgcagcacccacagaccagcagtaaaggacccccggaactttccaagtctagcacaaaacccagaagccacaaaggaaaatactggcagatttaaatgcatgaagtcaacattctttttgtagagctaaagaaaccataagcaaaattaaaagccaaatgcattctgggaggaaatacctgcagcatatttaacaaaacaagagttaacactaatctatataaagcttcagtaattgaatcagaaaaagacaacgccgtaggaaaaaaatggtaacatgaaaaggaatctcagaagaaatgcatatacttatttttttcttttttttttgagacagagtctcgctctttctcccaggctggagtgcagtggcgtgatctcggctcactgcaacctccgcctcccgggttcaagtgattctcctgcctcaacctcccaagtagctgggactacaggtgtgcgccaccacgcccagctaatttttgtatatttagtagagacagggtttcaccatgttcgccagatggtctccatctcttgaccttgtgatccacccaccttagcctcccaaagtgctgggattacaggggtgggccaccacgcccggccaaaatacatacacttaataagaacattttaaatactcaccaaatacatttttaagtgctcaacatcattgtaaaactgtaaaattttctattttttcctagtatttgtctagctttttcagactgggtctttctgttgctcaggctggagtgcagtggtgtgatcataggtccctgcagcctagaactcctgggctcaagcaattctcccacctcagcctcctgagcagctgctactacagacctgtgccaccacgcctgactaattttttattttttgtagagagaggatcttgctatgttgcccaggctggtgtcaaactcctgggctcaagcaatcctcccaccttggcctctcaaagtggtgagattacaagtgtgaaccaccacacctggccttaattttttaatttttgtggtttttctcttttgagacagagtttcactcttgttgcccatgctggagtgcaatggcacgatctcagctcacggcaacctcccaggttcaagcgattctcctgcctcagcctcccgagtagctgggatcacaggcagccgccaccacgcctggataactttttgtatttttagtagagagggggtttcactatgttggccaggctggtctcgaactcctgacatcaggtgatccacctgccttggcctcccaaagtgctaggattacaggcatgtgccactgcacctagccaatttttaaatttttggtagagatggggtctcgctttgttgcctgggctggcctcaaactcttggcctcaagtgatccttctgcctcagcctcccaagtagctaagactacaaacacataccaccacacctgacagagtcctttttttaaattcctccaaaggctagcacttttaaaacattagaaattccatttattttctgaaaatttttgtgtttccttatctttctggcagcctcattagaccttataatagaatcaaaatgaatcttaaacttttttttttgagactcagtttcactctgtcacccagaatggagtacagtggtgtgatctcagttcactgcaacctccgcctcccaagttcaagtgattctcctgcctcagctccccaagtagctgggattacaggcacgcaccaccatgttcagctaattttgtatttttagtagagctggggtttcaccatgttggtcaggctggccttgaactcctgacctcaggtgatctacccacctctgcctcccaaagtgcttgggattacaggcgtgagccacagcaaccggcctagatcttaaaatttaagagacattataatttaatttgatatactatggtggtagaaaaacatttcaaactcatatagatacagaaacttggaagcttcagttctacagtctttcatacatcaagttaaaccaaaaaacacaaaaactcactgatccacatctcaatgggctttctcctttcagtgtttccttaagtgacttgagatcacaaacatgcaaaataacgaccaaaaaaacctaacaaatcaggtttcctgtcatctctctctagataaaaaacagacccccaccgtcctgatggagataaactaagagatcataaaatcattgttgccagctatgagaaacagcttggtcaagagccagaaacaaaacagagaatcaggccagcctcagtggcccacgcctgtaatcccagcactttgggaggccgaggcaggcagatcacacgaggtcaggagttcgaggctagcctggccaacatggtgaaacctcatctccactaaacatacaaaaattagccaggtgtggtggggcacacctgtagtcccagctactcaggaggctgaggcaggagaatcacttgaacccgggaggtggagactacagtgagctgagatcgtgccactgcactccagcctgggcaacagagtgagatgccgtctcaaaaaaagaaaagaggctggggcgggaggatcgctggaaaccagaagttcaaggctacactgagctatgattgcaccactgcacaccagcctgggtgacagagggagactctgtctctaaaagtatataaataaataaataaacaaaaaaggaaagatagacagatgggggaaaacaccagagtccgtgaaagtattttgttgttgttgttgttgttgttcttttttgagacaaagtctcgctctgtcacccaggctggagtgcagtggtgcgatctcggctcactgcaatgtccacctcctgggttcaaacgattctcctgcctcagcctccagactagctgggattataggcacacaccaccacacccacctaacttttatatttttagtagagactgggtttcaccatgttggccaggctggtctcgaacttctgacctcaggtgatctacccacctcgtcctcccaaagtgctgagattacaggtgtgagccaccacacctggccttactgtattgttttttggtggtattgttatttttattggttttttctttttttgtgatggagtttcgctcttgctgcccaggcaggagtgcaatggcgaaatctcggctcactacaacctccgcctcctgggtttaagcgattctcctgcctcagcctcctgagtagctgggattacaggcatgcaccaccatgcctggctaattttgtattttaagtagagacggggttttaccatgttgatcagactggtctcaaactcccaacctcaggtgatctgcctgcctcggtctcccaaagtgctgggattacaggcatgagccactgcgccgctcatttttttttttttctgtagaggcagtctccctatgttgcccagactagtctcaaattcctgggctcaagtgatcctcctgcctcatgatattttctatctgaagttggttgaatccatggatgcagaacctgcagatatgaagggacaactgcagtcagaaagaaaagcaaattaaaaataagaagccactttatgcccatcagattgtcaaaatttggagagagggatgataccattggaaaagatgcagagaatcctaaggcgatgagaggacagactggcgcaccagtgcaggacagcaaccacgcagcacctgtgagcaagcaaatcccttctgatgcagcaactccacacttggaaacgtataccagaggaattgtgcataggcccagaaggggcaggaacagttcactgaggcagcactgacagtaacagggaactggaggggacctacttatctatcaagaggaaaatcagtaagtgaaacgtgatgaatgcatactgtggataccatgcaggactcaatgtccatacctcaacagggctgcatatcaaaagcaatatgagggagaaaagacatgggatgagagtatcgcccaagaacttcagtgtaattttaaaacatgcagacttaaccactgcagaattgcccaggggactcttcatacatagccaaggacccattcaaaaccctcaagagtggattcctagggtgaggtggggcttagaggtagtgcctggggacatattgatggccttgtgtcctgaatgcagtgtgtcatatgcaagtgaggaggacaaggaagagatggggccacgctgactgggaagagagaaagagtgaagcttatataagatagtacctgaaattaacagggtcctacctgatgaataaacctcaataaggacaagcatggatggagaaaggacacaagaactgattgaggtctatctggaattcaggaggaaccctggtcattacctttaactgatgaaaaaacaaagccaatcgcccaggcgcaggggctcatgcctgtactcccagcactttgggaggccgaggtgggcagatcacctaaggtcgggagttcgagaccagcctgaccaacatggagaaaccctgtctctactaaaaatacaaaattagccgggcgtggtggtgcatgcctgtaatcccagctactggggaggctgaggcaggagaatcacttgatcctggaaggcaaaggttgcagtgagcagagatcgcgccactgcactccagcctgggcaacagagcgaaactctatcttaaaaaaagaacaaagccaaactgaaggaggaactttgcccgtggtctctgggctagagaatggggcaaggtaaggagaaggatgtggagccagatgggacgcgccgcaaatacccagagatcttttttttgagacagggtctatctttgtcacccagaatggagtacaatggtgcgatcatggctcactgcagccttgacaccctgggctcaagcaatcctcctgcctcagcccccacaagtaactgtgactacatgtgtgcgccaccacacctggctaattcttgtattttttgtagacacggggtttcatcatgttgcccaggctggcatacaatatttttaatcattctgtgcacaatacaaagttttgactgtgacccgtcacacatggtgaattatggaatattccactcgtggcgtcatgttggtgctcaaaacgtttcaaattttggagaatttcagactttggattttcagatcagggatgctcaacatgtatatagtaacaaaacacacaggatttgctggcaactgaagccccattcaataaatataatggtgtaaaagcaaatacgagaactgcacccaagcaaataacagcaactaaaaagcaagccacagtgcaaaaaatatactgagggaattcctacccagcacctgcagcaaaagtcaacaaaatctggcacaaagccacaaaacccattcctgccggatatgatgttgccacacttcaccactaggggacgacgaaggtcacccagcgaatttgggccgcgatgctcagaattcctggccccgtctgctttcccagacaacggatggcctctttggcacctgtaaggtcccccaaactgcaagatgctagaaagcaatctcaagggaccagcagccccaggcctatgaagccctcaagagcctaactcgttctcttccatccacaatatgggcatgttatattggggtgcccaagggccccactttgcaccattctcttccatccacaatatgggcatgttataagatggtaaggaaggctggccatggtggctcacacctgtaatcccagcactttgggaagctggggtgggcggatcacttgaggtcatgagttccagaccaacttggccaacatggtgaaatcccgtctctactaaaaatacaaaaattagctgggcatggtggcaggctcctgtaatcccagctactagggaggctgagacaagagaatcacttgaacctgggaggcagaggttgcagtgagtggagtgcccgggcaacagagcaagactcagtctcaaaaaaaaaggccaggcgcggtggtgcatgtctgtaatcccagcactttgggaggctgaggcgggtggatcacctaaggtcaggagttcaaggtcagcctgactaacatggtgaaaccccatctctactaaatacaaaaaattagccaggtgtggtggcctatgcctgtaatcccagctaattgggatgctgaggcaggagaatcgcttgaacccgggaggtggaggttgcagtgagccgagaccacgccattgcactggacaacaaaagcaaaactccgtctcaaaaaaaaaaagacggcagggaagctgcagaataggccaggcaaggcggctcacagctgcaatgccagcagtttgggagaccaaggtaggcggatcacttgagcacaggagttcaagaccagtctgggcaacatggcaacaccccatctctacaaaaaatacaaaaattaatctgacatgaaggtgcatgcctgtagtcccagctactaaggaggctaaagtgggaggatcatctgagtctgggaggtccaggctgcagtgagctgagattgtgccactgcagtccaacctgggtgacagagcgagactgtgtctccaaaaaacaacaaaaacaaaaattaaaattaaaattaaattgcagaaggcattttttagaaagggggaaaagggtaagtgagtcttatgccagcaaactggatatcatccccacttaacagatgaggaaatagaggctcaaagaggcaatgcaacctatccaggctcaatcataccgctagggaacatcagaaccagattcaaagacaggtgggtcagatcgttgtcactgggacactgtacccccagccccagtcatatctgtgagaagagacaaacagataaggagagtatctgagggagggagggaatataaagaaatgacttcctcccgcagagacccttcatgccttccccaagtggtccacgagggccgtcccagttctccgagccacaacacttaaggatgggtgtcaggccttcacttggctccccttcctagcaggacccccagagctacggagtcagtttattcattcggcaagggctctaagtctcattcagacatttctaccttcagttctcaagtgtgacttgattttctccccatgtcggcccctaccttcacccaacccctcttcaaactctggaaagctctaagccagaatcctactcaagtcaccagacttgtcatactgttcccactgggcccagaaccccttgatctgagctttaaactttatttacatggagcactgtgattttcacttttttttttttctaaataaagatggagtcttgccacgttgccggggctggtctcaaactcctagcctcaagtgatcttccgacctcagcctcctgagttcctgggattacaggcagccaccaccgtgctcagctgtgatagtcttttttaaaaaattgaagcatgggctgggcgcggtggctcacgcctgtaatcccagcactttggtaggccaaggcaggcaatcccttaagctcaggagttcaagacaagcctgggcaacatggtaaaactctactctccaaaaaaaaacaataacaggctgggcgcggtggctcacgcctgtaatcctagcactttgggaggccgaggcgggtggataatgagctcaggagatcaagaccatcccggctaacacagtgaaaccctgtctctactaaaaatacaaaaaattagccgggcgtggtgacgagcgcctgtagtcccagctactcgggaggctgaggcaggagaatggcatgaacctgggaggtggagcttgcagtgagccgagatcacgccactgcactccagcctgggcaacagagaaagactccgtctcaaaaaaaaaaaaagacaaaacttgaagcataattcatgtatggaaaaatgcataaatttcaagcatgtaactacatgacctgcaatggcctcttaattggccttcctgaccctctcctccaccctccacagggccatttcgggttgcgcgttccaaggccgtctgaccacatcactaccccggccaaaaacctccaatatttctcctgctctaaggatggagaccctcagaaacagaatcataagtactcctcacctttgagaacgaaaaatgaggctgggcgtggtggctcacacttgggaggccaaggcgggcagatcatttggggtcaggagttggagaccagcctagccaatatggtgaaaccccatctctactaaaaatacaaaaattagccgagcatgctggcgcgtgtctgtaatcccagctactcgggaggctgagacaggacaatcacttgaacccgggaggcagaggtggcaatgagccaaaatcgcaccactgcaccccagcctggatgacagagcaagaccccgtctcaaaaaaaaaaaaaaaaaaaaaaaaaagcctggcatgttagtgcatgcctgtagtcccagctacttgggaggctgaggcagaattccttgagcctgggaggttgaggctatagtgagcggggatcgcgccactgaactccagcctgggcaacagagactctgtgtcaaaactaaaaataattttttaaaaacaagaaaacctggccggccacagtggcttacacctgtaatcccagcactttgggaggctgaggcaggcagatcacctgaggtcaggggtttgagaccagcctggccaacatggtgaaaccctgtctctactaaaaatacaaaaattagctgggtgtggtggcatgtgcctgtaatcccagctacttgggaggctgaggcatgagaattgtttgaacccaggaggcagaggctgcagtgagccaagactgcaccactacactccagcctgggtgacagagcgagactctgtctcaaaaataaaaataataaataataggaaaaaaaaaaaaaagagctgggcgcagtggctcatgcctgtaatcccagcaatctgggaggctgaggcggatgaatcacaaggtcaggagttcgagaccagcctggccaacatggtgaaaccccatgtctactaaaaatacaaaaaattagccaggcgtggtggcatgcacctgtaatcccagctactcgggaagctgaggcaggagaatcacttgagcctgggaggaggaggttgcagtgagcccagatcccgccactgcattccagctctgacgacagagtaagattccttctcaaaaaaagaaaagaaaaaaaaaagaaaacccatataatgtgcccactccattggcttaataaaattagttttggcaaatattcctttatgcccctctttaagtcaagcccttctcccatccctcaacccaggaaaccactgatttactttctataaatttctttggcttttctagaattttatatgaatgggtcacacaatatttattattttgtgtctggcttctttcgcttagcataatatttgtgagactggcctatgttattgtgtgcaactatagctctgattgccgagaaatattccactgtatagacagaatacaaccaatttacccttttaccagttgataaacatttgggttgcttatagtttggggccattatgaataaggctactatgaatattcatatacaaatattttgcatggacatatgctttgtcctcaaccaaaaaggacagatttctctttggtgcttcctgccattccatggaaaacataaatattctctgttaatttgacttactacagaaactagtctttctcatatgaaatacacacacacggccgggcgcagtggctcacacctgtaatcccaacacttcgggaagccaaggtgggtggatcacctgaggtcaggagttcgagaccagcctggccaacatggtgaaaccctgtctctaccaaaaatacaaaattagctgggtatggtggcacatgcctgtaatcccagcatacttgggaggctgaggcaggagaattgcttgaacccgggaggcggaggttgcagtgagccgagactgcgccactgcactccagcctgggcaacccatgagtgaaactcggtctcgaaaaaaaaaaaaaaggaaatacacacacactttttttttttttcgagacaaagtctcactctgccatccaggctggagtgcagtggcacaatctcggctcactgcaatttccacttcccgggctcaagcgattctcctgcctcagcctccagagtagctaggattacaggtgcgcaccaccatgcccagctacatacacactggtttgtgaaacacatcagactggccaggcgcagtggcttatgcctgtagtcccagcactttgggaggctaaagtgggtaggttgcttgagctcaggagtttgagacaatcctgggcaacatggtgaaaccccatcactacaaaaaatacaaaaattagccaggcatggtacaatgcgcttgtcgtcccagctacccaggaagctgaggcgggagacagaagttgcagtgagctgagattgagccactgtgctccagcctaagcaacagagtgaaaccctgtctccaaaaataaactaatttttaaaaagaaacacatcaggtaattataggaggtcatcgaatgtgaccagtgaaggtgttttttctgtaactttccctactgcttgccaagccattggcagggcagggcaggagcattttgttgcttctctctcatgacagcctcaggaagagacagggctgcacccacttcccagatgggaagttaagctcggggaagcgggggatgacccaaggtatacccacctcagggctcaccgaagtcaagatacatcccagggcaggggcctgaggaactggctccaccactgacttgctgtgagctctgcctgggcctcagtttgataattccctgagaatcacaaatctctgatattcttctggaaaagtcctgacttcaaatatgctgctcctgacaggtgtgatggctcctgcctgtaatcctagctcctcaggaggctgaggcacgagaatcacttgagctcaggagttcaagaccagcctggacaacataggaagactcatctcaaaaaatatatatatattctcccaccaatcaccacaatgtccaggaaatgccaacagtagtcccagctactcctgcagctgaggcaggaggattgcttgagcccaggtggcggaggttgcagtgagccttgatcacgccactgcactccagcctgggtgacagagtcagaccctgtctttaataaataaataaaatatttcacccaaccacagtagaaagttgcaacaagaaagccagcatgaaattagccgggcatgatggtacacacctgtaatcccagttactcgggaggctgaggtgagaatctcttgaacctgggagatataggttgctgtgagctgagatcacaccactgcactccagcctgggtgacacagtgagaccctgtctcaaaaaaaaaagccagcatgggaagccaggtgggaaattttcctatctaactgcctccatatccctcttactaaattactctgggcttaaccaaggaagacagttagagcctgacacttgggggccaaagaaacaaagacaacgaaagcagccattaaatggctctgcaggaggcagagggagagaagtgtttttgctccagagaggaaaggggagagggaaggagggctgggaaacggactgaagaggagaccagagccaggagctggatagtgacaggaggctgggtactggtgggccaagtcaaactctgcaaagccagggcccagaggatgcccaaggatggagaacatggaaactgacctctgtgtttctgtcaagtgtgcctttcgtctcaccctccagcactaaagggctcaattcacttgtgttaccaaggtttggtgactgcggagttaccaaggtttggtgactgcagagtctaaggggagcctggcagagatgaaggggaaagactgaactgtggaaactatcaacttagtccattttgtgcttctatgacagaatacctgagactggtaacttataatgaacagaagtttatttggctcacagttttggagggtgggaagtccaagatcaaggaactgcatctggtgagggccttcttgctgcctcatcacatggtggaaggcctcacatggtgagagagtacacaggacagaaggcaagagagtgctgaactcacattttatcaggaatccactcctgtggtaagagcattaatccattcatgagggcagagcctcttagaggtcccatctctcaacactattgcattggggattaagtttacaacgcatgaactttgctcatggggcacattcaagccatagcaactacacagcaccagggtaggctgtaggcaagcaggccccagaggccaagatgatggagaatgggaactactaggaatctacaggcatctggcaaagggctgaggacttcctcagagtatggaataaaatttcaactggtcttatcaagatccagagcaggaagaccaagttgacaaagatcacttagatgaatccaaaatgaatgaggatataggaggtggagaaataccagaggacacaccttcagggacagggcagttgggatgggcataagagcacaggctcaagagtcaagattgtctgggtctaagatactatttcctactaaagcaggatattttataattttaaaaaggtcattccatcagaaacaggtaaagttttaaacatatacggaaacagcagagcaccaaaatacaggaaacaaaggctgacagaaatgaagggaggaaacaactcaacagtcatagttggacttcaattcccactttcaataacagatagaacaagtaggcagaagatcaatagggaaacagaagacttgaacacacgacaacactaccaaccacccagacctaacaccgatctacagaacactgcaccctacaccacctagacctaacgcccgtccacagaacaccgcaccccacgaccacagaatacaacactacccaccacctagacctaacacccatctacagaacactgcaccccacaaccacagaatacaacactacccaccacctagacctaacgcccatctaaagaacactgcaccctacaaccacagaatacaacactacccaccacctagacctaacgcccatctaaacactgcaccctacaaccacagaatacaacactacccaccacctagacctaacacccgtctacagaacactgcaccctataaccacagaatacaacactacccaccacctagacctaacgcccgtctacagaacactgcaccccacaaccacagaatacaacactacccaccacctagacctaacgcccatctaaagaacactgcaccctacaaccacagaatacaacactacccaccacctagacctaacgcccatctaaagaacactgcaccctacaaccacagaatacaacactacccaccacctagacctaacacccgtctacagaacactgcaccccataaccacagaatacaacactacccaccacctagacctaacgcccgtctacagaacactgcaccccacaaccacagaatacaacactacccaccacctagacctaacacccgtctacagaacaccacaccctacaaccacagaatacaacactacccaccacatagacctaacacccatctacagaacactgcaccccacaaccacagaacactaccaaccacgtagacctaacacccatctacagaacacggcaccctacaaccacagaataccattctttcttcttttttcatttttttgagatgggatcttgctctgtcaaccaggctggagtggagaagcgtgatcacagctcaccgcagcctcaacttcccaggctcaggtgatctcccacttcagcctcccaagtagcttggagtataggcatgccccacccaagctaatttttttattttttgtagagatggggtctcactacgttgtccaggttggtctccaactcctgggctaaagggatcctcccacctgagccacccaaagtgccgggattacaggcataagccaccatgccagggccacattattcttaagtggacatggtacattctccaggaaagaccatatgctaggtcataaaacaaacctcaattaatttaaaaggactcaaataatacaaagtgtgttctctgaggacactataatgaaattagaaatttgggaaacatgggaaactcacaaatatgtgaaatatgtggaaattaaacaacatactctaaataatgaatgattcgaagaagaaatccaaaggggaattagaaaatattatgaaatgaataaaaaggcttaaaacttatgaaatgcagctaaagcagtgcttgaaggaaaattcatagctatcaatgcctttttattcctttgagacagtgtctcgctttattgcccacactggagtgcagtcatgcaatcagggttcactgcagcctcacacccctgggctcaaacaatcctcccacctcagcctttggaatggctgaaactacaggcaaaagccaccaacacctggcttaattttttatttttcgtagggatggggtcttgttacattgcccaggctggtctcaaacccctgagctcaagcgacccgcgtctcagcctcccaaagtgctggtatgagccaccatgcctggccatatgtgcctattttttttattattttttatttattaatttttttttgagacaaagtcttgctctgtcacccaggctggagtgcaatggcgcaggctgggctcactgcaacctctgcctctcaggtttcagcgattctcctgcctcagcctcctgagtagctgggattacaggcatgtgctaccatgcccagctaattttctatttttagaggcgaggtttcactatgttggccaggctggtcttgaactcctgacctcaggtgatccgcccaacctcggcctcccaaaatgctgggattacaggcatgagccaccacacctggcccatatgtgcctatttaaaaaaaaaatgaagattgtaggccgggcacggtggctcacgcctgtaatcccagcactttgggaggctgaggcaggcggatcacgaggtcaggagattgagaccatcctggctaacacggtgaaaccccgtctctactaaaaatacaaaaaattagccaggtgtggtggcgggtgcctgtagtcccagctactcgggaggctgaggcaggagaatggcgtgaaccatggcggcggaacttgcagtgagcctagattgcgccactgcactccagcctgggggacagagctagactctgtctcaaaagaaaagaaaaaagtaaataaataaatatagattgtaaatcaataatctaaccttccactttaagataccagaaaaattagaaaagaagagcaaaagcaggagtaagcaaaaggaaagaaacaataaatgctggggcagaaatgaatgaaatagagaacagaaaaacaatagagaaaattgataaaaccaaaagttggttctttgaaaaaagtcaaagcaactgacaaaccctcagctagactgaccaagaaaaaaagaaaaaagacttgaaattactagagtcagaaatggagacgataatattaccattaacctttcaggaataaaatcctacctcctccaatgaccagttttataacctcaggtgttacttagcccctctgtgcctcccttatctctattctttaatcccaacactttgggaggccgaggcaggtggatcacttgagctcaggagttcaagaccagcttgggcaacacagcgaaaccatgtctctactaaaaatgcaaaaattagctaggtgtggtggcgggcgcctgtaatctcagctacttgggaggctgagacatgagaatcacgggaacctgagaggcggatgttgcagtgagcagagattgcaccacagcgagactctgtctcagaaaaagaaaaaagaaaaaaaagcagtggactcctagatcctatgaaggctgcaacctagacccgacaagagatcagaaatttattatccaaagaatacagaaggtcctggacagatgaacaccaggcacaggagaggagaagacagcaacaacagaagggttacacagaaattcatgtactcagtgttgaggatatccagacccttagtcttcctccactcagcttgggaacactgtcagcaaggcacagagcccactcaggccttcatgccgcactagctcccagggccccagaccttctagtacaatggaaaaatgagactgtcaaggcatagctctcatcaaagaaattccaggccaggcacagtggctcacacctgtaatcccaacattttgggaggccaaggcaggcggatcacctgaggtcaggaatttgaaaccaggctgggcaacatggtggaacgccatctctactaaaaatacagaaattggccgggtgcagtggctcacgcctgtaatcccaacacttcgggaggccgaggtgggcagatcacttgaggtcaggagttcgagaccagcctggctaacatggtgaaaccccatctctactaaaaatacgaaaaattagctgggcgtggtagcctgcgcctataatcccagctactcgggaggctgaggcaggagaatcgcctaaaccgggaggcagaggttgtggtgagtcaagatcatgcctctatactccagcctgggcgacagagcaagactccgtctcaaaaaaaaaaaaaaaaagaaaaaaaaaagcctactgaagcctgatagcttccaacttttcttcagcagcttcctcagctctctcagccttcagagaattgaagacagttagggcttatgctctggattaggctttggtttaagggaacgttgtcgctggtctgatcatctatctagaccactcaaattttctccatatcagcaataaggctgttccctttcttattactgtgttcactgaaatagcacctttttctttatttatttttgtattttttttttctttttagtacagatgggctttcaccatgttggccagggtggtctcgaactcctgacctcaagtgatcccacctgccttggcctcccaaagtgctcaggttacaggcatgagccactgcgcctggccaatttttgagacagggtctcactctttcacgcaggctggagtacagtggcacaattatacctcaccacagcctcaacctcctgggctcaagccttcctccacctcagcctcccaagtagctgggactacaggcattcgccaccatgcccagctgattattttttgttgagagggggtcttgctatgttgctcaggctggcctcaaactcctgggttcaagagaccttcccctgcctcggcctcccgaagtgttgggattacaggcatgagccaccagacctagccagatagtttttgtttgtttgttttgagacagagtcttgctctgtcgcccaggctggagtgcagtggcgtgatctcagttcactgcaacctctgcctcccagattcaagcaattctcccgcctcagcctccccagtagctgggattacaggtgtgagccaccgcgcccagccaattgttcttgagtgaaattaaaagtgctactccagaggcggggcatggtggctcacaactttaatcccaacacttgggacggctgaggcaggaggatcacttgagcccaggagttggaggccagcctggacaacatagcgtgacctcgtctctactaaaaactaaaaaaacaaaaaaaaggcctatcttggctttcaacatgcctttctcactgagcttaattatttctagctcttgatgtgaagtgagagatttgcaactcttccttacacttgaacacttagaggccactgtacgattactaattgcaaacagctggttggtggagcggtcagaacacatacaatattgatggagtaagtttaccgtcttacacaagcatcattcatgatgccccaaaacaattacaatagtaacatcaaagattattgatcgcagatcaccatactagatataataataacaaactttgaaatatttcaagaattaccaaaatgtggcacagagacacatactgagcatccttttggaaaaataatgctggtagactttgctcgacacagggttgccaaaagccctcaatttgaaaaaaacgcagtacctgcaaagcgcaaaaaagcaaggcacaatgaaacaaggggtgtgcctgttttctttgactctcaccgaagccttgtgtttccacaacatgagaaaagggaggttcagaaggtgtggatgattttcctaaatcacctggctagtaaccaagtcccagggccacagccttcccaccgcaaggcactgtcgcccaaagccttcaggagtaagcttggctgtaggttttccagccataggcacacagccagacacaggtgggcactcagaaattagttacgtgagtaaatacccaacaactaggagaaagctaggcaaattgtggttgaccaacaagacactgcaagacttttcaggaggaagatgtggaattccacttatcaacattagatgaaaatgcagaacctcacataacagccacaaatctccctagatctcagaggcgggtctccatccgctcggcctcaattatccagagctgagtcaccaactatcctccctccagtctctccccagctctccgcaggaaccagctggagctctctactgcccacactgccaaatccaaattcttcatcctggccttcacagcccttccatctcaaccaatccagttgtttcctgaacactttcaccctccctggcctttgttggactcttccctctaccccacagaagcccatcttctcctttatcctgagatgcaacttggctcatatggattctcagtgaatgctggtgcctttccccacttccatcaaaaagggagcggtggccaggtgtggtggctcacacctgtaatctcagtactttgggaggccaaggcaggtagatcacctgaggtcaggagttcaaaaccagcctggccaacatggcgaaaccccgtctctactgaaaatacaaaattagccgggcgtggtggtgcatgcctgtaatcccagatactcaggaggctgaggcaggagaatcacttgaacctggcaggcggaggttgtagtgagccgagatctcgccactgcactctagcctgggcaacaagagcgaaactctgtctcaaaaaaaaaaaggaagcggctcacttttttttttttttaacaaaagtggatttattcatttaaacctatgtgatcaccaagttcactagaaactggcaggatgaacctggagcctcacatccaagagcctccggtttgggtttttctggtacggaggcagggaactgacttagatgacctgggcagccaggctggtctgggcttggatgcctttccacctctccttcctctcctagtctatccccagctcccttccaggggtcaggaccccaaactcctattaggcaagtcttttcttcccttagcaacccagtttcttcaaacatggggaaaaaaggtaggaggagcttcttatcacaatatttctttttaatttagaaagaggaggagaaagctaggctcacacctgtaatcttaacactttgggaggttgaggcggtggatcacttgaggtcaggagttcaagatcagcctggccaacatggcaaaactcaagtctctactaaaaacacaaaaattagctgggcacggtggtgggcgtgggcgcctttagtcccagctactcaggaggctgaggcaggagaatcgcttgcagctgggaggtggaggttgcagtgagctgagatcgcatcactgcactccagcctgggcgacagaacgagactctgtctcaaaaaaaaaaaaaaaaagaaaaaagaaagtaggggagagaaaaatgacaataacttatcacttggaaaaagttttcccactaaagttctcaccaactatgtccaaagtccctccttgttgggacactgtaagctgtcaataaatataccttggtcatgcccctacattagcgcgcaccaacttaccccattttaagagcctgcggtagagaggtctcagagttgctataatgggccagctcctggtgaggggtatttagttgtttgcaattttcccgaatgaacagttctgcaaagaacaatcttctataagcatttatctttgttgtacagctacttcaaaagacagattcctagaagtggaattactgtcttagagaatctacacattttaaattctgatacttactagttcagaaacttgacacggtaattctcaaactctaattgcacttaggctttatctgtgaagcttgcttacgtgcaaaatctgaccggctaccagcctccctccaccactaccccgtcctccaggagagaggaggggctccaggtctttgttatgcagctctcaggtggaggaggaggcagcactcccccgcttccattttcccaaccacatctagcaccagacttgggaaacactcgtctaaggggctgctgcaggcacaatttacggtgcggtctcttcctctagcccaggcccccagtggcttccccagaaagggcagaatgtggctcttacgcatacaggagaaaaacgcctagtgcggagttcaagctcagcagccactaccagagccccctctccaggctcacctggtcgcacccatttccccctggggctcccctcttctgaaggtccctgtcccatacatttcctagaggccaaggcccattggttttacatttcttacctaaggcaacccagacgtggctttttctttcacagggccgtggggggagcaccacttccccggccaaaaaaattgtttctgacccacactctgggccttattttccctgtctgtgaaatggagagcaacaggcagtgccactgacatttcacccgctgccgtgaggaggtttttaacatttgcaggaagtctggcttctatggggtgtccaggtgaaaccttaacaatctttaatcagcattctgattggcttaaggcttgtttggaaaaaattaagagttttgttcctagagttctccattgctaaagggtaattaagtccaaaagctgttttcaaagcgatttccaagctcaagggccctagatatctggacctagccgtgtccgggtacagggctggggggcgtggggggatgccctaagaggctggttaacagaaatatcacagtatgtggtacccacagcagagagcagggaagaatgtactgactggggtgggggaggccaaggaaaaccttctggagtagggtgtaactggcagaagaggaaaaagaaaccagacaggaactccgggagctcctggactgatcgtttaaggccgggcacaaggggtaagggatcaggcttcactatcgaccgacctgggctgaatgataccggttgactgtgtgacaaaagcaaatcaagaacctctctgcggctcatgagtaagccagagacttacataggacaacacataccctatcacccgaggatgagacgggatgacacacacgaagtgccccgcacagcgtcgttgtaaagcgttggctgttttcacctctggccgccccctgtgagcccgatcatgtgctttttgggcttaggtcggaggcggcctcccagattctacaggccattgaggtcgtaacaagcgtctccatcagagcctagtccttaactagctgcgggtaagtgcccggactaagtggcctcagtttcccctcgaagcaacgggaccaatcgcaccgccggcaggacatcttgtgcggggcgcgaagtgacaaaagtcaggatttgcagaagttcccactcggtaacgacccccaccccggcaaggagcacagtaggcgctccggaaacgccctccacgaggagggccgggccacttcctgcccccgagcgggctctccccggcggaggctcccaccgccgctatgggtaggccatgcagcattcctgagggcggggtgggcgcaggaagaaggtgcccgcggccccgccccctccgggcgcgctgggcggggcgaagcccctcggcgccgacggcccgccccgcggggggtgggcgcagctcgtcgcgctccgcacaaagtttgttttctccctccgggcgggtgggggagggcgcagagggcgcggggggaggagaggggatctgacgtcaggccgcgaggtgctttccagccgcgagctgtcaggccgagtgtcaggccgggcaggtacgcggcgcgcgcccccggcgccccccgctccccgccgggacgccccgcgccgagccggaggccgcgtggacccgaaagccgctgggaaaagtcagtgcagggagcagcagagggccagatgggggtgggggcgcgcggacaacttggaaagtttctttttctcggccggacggggagggggcgtcgtcctggcgcgtgcggtagggggtgtgtgagctcgggggtgtttgtgagtcccgacggcccccggggggtgtttgtgagtcccgacggcgctgcgctccgggggccggtgggggactgttccagcccccgggaggaagcccgcttggggccctggtggggggcccagcttcataggatcccaccccaggagagggccgatcctgcaccggacctgagtgagcgcgcggggggacggatttgtttggtttcaaaagtgcacgttgctaaccgccagcagggcccccccgccgccgagccggacagggggcggccgagagtgacagctgggggtgggggccgcgggaagggcccggagcgggggggccctggggagcccgcgcgagttcccctttcctttggaacaaaggaaagtctgtctccgaggcatctgtcactcccaggctggccaaggaagcggggcgcgtggggccggcgccccggagaaagtttgttcgcgccgggaccctcgggcaggccgaaggtgatccaagcctcccgcgggagaagcgcgtagtctccggggcagggggcggccaacatggagtctgggcgcagggctgggggggggggggcggcgcggaggtgggagcccagccccctcccctcccttcccctcccctccccctccgggcccagttcggagcacaaagccgagcgcgcacgctccgccgtccccgcgccccgaagagtcggccagccccgaactgccggagtaggggtgggaaccaaactttttcctgccccgggacagacacgtgagttttctttcttccagagcccccgtcccaccgggatggcgggcccgcgcgggagctggtgcgcggagtcggcccggggtgtggggactgtggggtgcaagcgccccgagcgccggacgattcctcgccgacccaggagccatgtgctccgactcggtctgggccgcgggggaggttgcgcgctttgtctgaactgctgggaatgcgggcgtgagtgcgcggcccgggggagtgtcgggaccagctaggggagttgtcagaaagttcgtgcgggagtggctgcaggtggcgtcgtgggagtctgtaggagggtgtacgggatgttgtgtcgaggggttgctgccacaggtcactgagggtagaactgattgttagtgtgatgacgcctggagttttccctgtcggagagatcgggggtggccgggtcggttggagttcgtgggtgggcgggtacagaagttgggctagttgtgtgggtcacagttgttcgtgctaggcctggggtctgtaagctgtgcgtgtgcgtgctgtatgcgtcggtgaaaaccctagggtttgtaaggcttgagcgatgggtccgggccagttatcctagcgctgttggttaattgcctggcgtgagtgtgtctgggtgcggtgtggggtgcatatgtgggaagcctcccagactacagatggccctgtgtggcggaacaccgaggtggagaagtttgtgtagactgaggggtcattccccagggcccacccggggaaccctgcagacagacttggctggcagccagggtggaatttgtacagataaccttgagtacttctcacagccggccagggctgcatcactgagcccagatcccagctgccctggccacctagaaatggctgtctgacctcagaaagcagcctgcagtggtgctctctgaggagtggcacgtctaaccagtgcctgtctcacctccaggtggcctgactgaaagggtagacccttccctcgaaagcctggcctagccagcccagagatctgggctcgggtccaagaagaggaaacaaaacctgggagatgccagagtctgttggccggcctgctggggagctgttaaaaggctgagaagggaggagccttgagatcctggcatcagcctggcctagaacttttgcttttaaaatgaaaatctggctgggcggggtggctcacacctgtaatcccagatctttgggaggccgaggcgggcagatcacctgaggtcaggagttcaagactagcctggccaacatggcaaaaccctgtctctactaaaaaaaaaaaaatagctagatgtggtggcacacacctgtaatcccagctgttcgggaggctgaggcaggagaattgcttgaacctgggagatggagattgcagtgagccaagattgcgccactgcactccagcctaggctacagagcgagactccatctcaaaaaaaaaaaaagaaagaaagaaagaaagaaaatctttgttgcacgtgtgaaacagaactttgtccagggactgagcagctgagttgggttatctagggaaaatccttccttcatttgacaggtgaagaggggactcaagcccagaaaggggaggatccttgtccaagttacagtgccaagtggagggtgggccttgctcattcacctggattttgagtggttgagtctaggaccaggctaaaggggcctgacaaaggagaatgtccaagaagcaaccagtagagagatgactcacctctctcactgcaaggtacacagtaggtgctccttaaatattacttggactgctgcaggatcatggtgatctgtagtttccagagttctcactggcccttgggagacctaggaggcaagacagtatacagctcacaagagggggtggggagaggcctggtccaaatccgacttcactatcctaacctgggggtgggatttttttcctttacagctttattgagatataactcacataccatgcaattcacccattaaagtatactcatcagcaggtttggtatgtttgcaaccatcactatagtcaattttaggacttttttgcggggggatagggggacagggtcttgctctgcctctcagatgggagggcagtagtgtgatctcatctcattgcaacctctgcctccgggctcaagcgattcttccacctcagcccccagagtagctgggaccacagacatgcattaccgtgctcaactaatttttgtattttttgtagagatggggtttcaccgtgttgcccaggctggtcttgaactactgagctcaagcgatccacctgccttggcctcccaaagtgccaggagtataggtgtgagccacagcacgtggcattttttttttattattttatttttgaaaacaggtttttaattatgtcgtccaggttgacatgcactggtgcgatcatagctcactacagccttgaactcctgggttcaagggatcctctcacctcagcctctcagaatagctgggactactggcacaccatcacactgggctaatttttattttattttatttttttatttttttcttttgttgagacagggaatcactctgtcacccaggctggagtgcaatgccatgatctcagctcactgcaacctctgccttctaggttcaagcagttctcctgcctcagcctcccaagtagctgggattacaggtgtgtgccaccacacctagctaatttttttttttttttggtatttttagtagagacggggttttgccatgttggccaggctggtctcgaactcctgacctcaggtgagccacccacctcggcctcccaaagtgctgggattacgagcgtgagccaccgtgtccggcctttgtttgtttttgtttttttttttttgagatggagtctcgctgtgtcactaggctggagtgcggtggcacgatttcggctcactgcaacgtccacctcccaggttcaagcaattctgcctcagcctcccgagtagctgggactacaggcacgcgccaccatgcccagctaatttttgtatttttagtagaaacagggtttcaccctgttggccaggatggtctcaatctcttgacctcgtgatctgcctgcctcggcctcccaaagtgctaggattacaggcatgagccactgtgcccggcctttgttttttgagaccttttttattttgttgtcacccaggctgaagtgcagtggcacaaacacagttcactacagccttgacctcctgggctcaagcaattctgcctcagtcccacaagtaggtgggcttacaaatgcacagcatgacacctggcttatttttgtattttgtgtgtgtgtgtgtgagccactgcgcaggccttgggcagctttcttgatctctgttacctcatctataaaatgatgataataatagcttctcccttattggggaattgtaatgattaaatgagataacatgtaaaatgctcagtacaggccaggcatggtggctcacgcttgcaatcccagcactttgggaggctgaggctgctagatctcttgaggccagcagttaagaccagcctggccaatatggtgaaaccctgtgtctaccaaaaaatacagaaagtcagccaggcatggtggtgcatgcctgtaatcccagctactcagaggctgaggtgggagaatcacttgaacccaggagacagaagttgaagtgagccaagatggcgccactgcactctagcatgggctacagagtgagagcctctctcaaaaaaaaaaaaaaaagaaaagaaaaaaccaaatgcttagtaccgaacatggaaaacagtagacctcagtagaagctgtaattgtttccagcctgagtcctgcttgtgaatgagctgccattcggtagtcacctacctgttccatgaagtggaggaactttggactcatcccttctagcttgctcggtctgtgttacggcctgagattctgaattgcaactaccccatttctggtgtcccaggctcaagtaatgctgagcatgtttggagactaggaaaaggcggtacgtgctaatgatgttcccatcccctgtgtcccttgtcccaggtttacccaaggtccagcctagcccctaggcaccatgtcggacagtgatctaggtgaggacgaaggcctcctctccctggcgggcaaaaggaagcgcagggggaacctgcccaaggagtcggtgaagatcctccgggactggctgtacttgcaccgctacaacgcctacccctcagagcaggagaagctgagcctttctggacagaccaacctgtcagtgctgcaagtaaggaggggatctggataagggggtggcaggaggacctgggttctagtcctattccagctgtgtcactgagtcactgtggtcttgggccactcactttcactgtctgggcttcggtttcttcttgggttaggggagaacacccactctccctgtctcaagggaagacaatgaaatagggtcgctgcagtcaatttcagactttagatagtcctttttttttgagacggagtcttgcactgtcacccgggctggagtgcagtgatgcgatctcggctcactgcaacctccgcctcccgggttcgagtgattctcctccctcagcctcccgactagctgggattacaggcgcccgccaccacgcccagctaattttttgtatttttagtagagacagggtttcaccatgttggccaggctggtctcgaactcctgaccttgtgattcacccgcctcagcctcccaaagtgctgggattacaggcgtgagccaccacgcctggcccagactttggatagttctgaagaggcaaggaatttaatgttgtcaaagtctaggtgtcatccttaactttggaggccaagggaagatgagaaggcatcgagcatctaggattcagcccccagccccaacgcagtattggacggcgacttggttgaaaggggcagctgtaatttgcagtgtggttaagagatggggcaggatcacagtccaggaaagggcagaagtcagaggttctgtgttcataatccagttctgcctcacgtcttgatttccttatctgtaaaggggcagggggtacacagagtcttcccctgcctggtggatctgttgtgacgaatagattcagaactggatgtgaaagtgctttgcaaaccatgcacatgaacacactcaaaagatagccttatcccctttttgtcagagtgcaaagtactgtcccctttgaatcgcgcctattgctgacccgcaggtgtctttgttctgctttcctggagcagaggcgggggaccctgaaccaccattgctttgcctccagtttgcctctccccttcctggagacacacagtaggcccttagcctaatacaagaggcccagccctgccctgctggcccccactgctcccttcctgagccagtcaaacctctcccacaagctctcctgtttctctttccccctctgtcctttcatagcttattactccaacctttgatgctgtctctccctccttcccttatcccactctgaacctcccacgtcttcctagctcctatctttcttccatgtagagacatggtaagtattttagccctcagaactcctgtcacctgactttatactctgggcaatggttaatccaagtctctgtatgagaaaggctctaaagttacagatcctgactcagattccatcttctccacaagaggaaacctggaccttggccaggtcactgccttctctgtgagcctcattattccctcatctgaaaaaagggaggtgattgtagcactttcatgagtgtagggagaaagggacgagaagaagaattcaaggctcactggggcccttcacagtggctcacacctgtaatcccagcactttaggagaccaaggtaggaggatcgcatgcgcccaggagtttgagaccagcctgggcaacatagggagaccccatctgtacaaaacaaaaaaattagctgggcatggtggtacatacctgtagtctcagctacttggggggctgaagtgggaggaaggattacttgagccctggaggtggaggctgcagtgagctgtgatcgcaccactgcactccagactgggcgaaggagtgagacattgtctcaaaaaaaaaaaaaaaaaaaaaaaaaacaaggccaggcacggtggctcacacttgtaatcccagcactttgggaggccaaggcgggtggatcacctgaggtcgggagttcaagaccagcctggccaacatggagaaaccccatctctactaaaaatacaaaaaaaattgccaggtgtggtggtgcatgcctgtaatccaagctactcgggaggctgaggcaggagaattgcttgaacctgggaggcggaggttgcggtgagccgagatggtggcattgcactccagcctgggcaacaagaacaagactcggtctcaaaaaaaacacctactggtcagtgtttggcatacagtgggtgtttctactgttttcagcttcatctctgcctaaggcacaaagtctttggctgatcctgggtgcccagcagtgcgtggcatctcacagtgtacctcctcagcatggagctgtgcagagttgggatctgagagaggctccagacacattcttaccctcgaggagtgtctggacagcctctttgcgggtctccctgccttcagccttcagccttcagccttgttcatttaatccattattttgaacacaaaagcccaaatctgatagggccaggcactcctggactctactgccctcaggatagagtccaaactgatctacagcctaggtttggggctgctgcttatattcccagtgcacctcaccctgtcctgtcaaaccacttgtcacactctattggaattactttttgtcagggacactttctcaaacctgagaaatatactaactccttttatttatttatctgtgtgtgtgtgtgtgatggagtcttgctctgtcacccaggctggaagtgcagtggtgcgatgtcagctcactgcaacctctgcctcccgggttcaagtgattctcctgcctcagcctcctgagtagctgggattacaggtgcatgcccctacgcccagctaatttttgtattttaagtagagacagggcttcactatgctagccaggctggtcttgtactcctggcctcaagtaatccgtccacctcagcctcccaaagtgctgggattacaggcgtgagccaccatgcctggcccatctttttaaagaaaacatttttcggccgggaatggtggctcatgcctgtaatcccaatactttgcgaggccgatgcgggcggatcacctgaggtcaggagttcaagaccagcctgaccaacatggtgaaaccccatctctcctaaaaatacaaagttagccagacgtggtggctcatgcctgtactctcagctactcaggaggctgaggcaggagaatcacttttgaacccgggaggcggaggttgcggtgagccaagatcatgccattacactccacctgggccacaagagcgaaactcggtctcaaaaaataaaaaaataaagaaaacatttttcatggacccatctccccgcaagatgttaacctgaatcatttttatcatatcacttaggtaaaacataaaactgggtatatatataaaaaaaaaaccacttctttttgcttttgttcttatacctaaccttaaaatcaaactgtttccaaagtagataaatgtaaaaaccgtgacattccacctgactgtgttaactgaaaatggtgggtggtgctttgctgactgcactgcaggatgtggtgtggcaaaggcacagactcagcagagtagatctggatggtcttaggccccgatgctcctactggtgatgaaaatggaaacccaaagccaaacatccttctagagaactggcgaacccctcaaggtgacacatccacaggtcccacctggagaaatgtaaatgtaaggaaaggaaactgggcatcccctggagggaggggacccgtggtggccacctgctctagagtcatgccgagagttaagagcagtggggaccacccagccctccttgatggaaactgaccatgaatcccatgtcagccccagctgcacacctgtctggtaactcctcccagttagttcattgccctcagctcatttggtcaattaccagctcctgtacaaataccccttaaatatttcagggttttggcttctttcctaccctcatctaaaccatcattatctgatcacaatcatttatcactccccaacttaaaacccttcaggccaggcatggtggttcgtgcctgtaattccagcactttgggaggctgaggcaggcagttcgcttgaggccaggccaggtgttttgaggccagcctggttaacatggttaacttcttcaatactaaaaatacaaaaatagccgggcatggtggtacatgcctgtaacccctgctactcaggaggctaaggtacaagagtcacttgaaccaggaggacgagactgcagtgagatcgcaccactgcactccagcctgggcaacagcaaaactgtctcaaaaaaaaaaaacaaacaaacaaacaaaaaaaaccttcagtggtctggcagggtaactcatacctgtaatcccagcactttgggaggctaggatgggagactttcttgagcccaggagttcaaggctacagtgagctatgatcatgccactgccctccagcctaggtgacagagcaagaccctatctctaaaaagaaaaaaaaaaaaaaggctgggcactgtggcttatgcctgtaatcccagcactttgggaggccaaggcgggtggattacctgaggtaaggagttggagacctacctggccaacttggtgaaaccttgtcctactaaaaataaaaaaaattaggctgggcgcagtggctcatgcctataatcccagcactttgggaggttgaggcgggtgggtcacctgaggtcaggagtttgaggccagcctggccaacatggcgaaaccccgtctctactaaaaatacaaaaattaaccaggtgtggtgctgtgtgcctgtaatcccagctacttgggagactgaggcaggataattgcttgaacctgggaaacggaagttggaatgagccgagactgagccaccgcactccagccggggcaacagactgagactctgtctcaaaaaagaaaagaaaaaaaaactagctgggcgtggttgcaggtacctgtaatcccagctacttaggaggctgaggcaagagaattgcttgaactcgggaggcagaggttgtagtgagttgtgattgcaccattgcactcctgcctgggcaacagagcaagagtccatctcaaaaaaaaagaaaaaaaaattcaatggcttttgccagcctaatgacatcaccggcccgtgtctacatcttgaacctcaaccctggtcccctacattcccactacattgatccacctccccagaccattttcctcccacccctgaccaggaggctcccagtccctaaaggagctgtatgctctcacagcagatagatgaggtcacagcactgggacactaaactgtaattgcttttagactgcaccaaattctagaggtgtggagagcactgacctagtgttcacagttacagccctagtgtagcatagtgcttggtatctggtaggtaggtgctcagtaaataatgttgaagtggcagaaaagggctataaagtggtggaagggtcaacaggcaggacctcagaagtaaggaaatgtaatggctcctaatcatgaaaaatagcctaaagcctgggagcatcattttttcctgtatttattaattaattttttttttttttgagacggagtcactctgtcgcccaggctggagtgcagtggcgcaatctcagttcactgcaacttctgctgcccaggttcaagcaattctcctgccccagcctcccgagtagctgggattacaggcacctgccaccaggctgagctaatttttgtagttttagtaaagacagggtttcaccattttggccaggctggtctcgaactcccgacctcaggtggtctcacttcagcctcccaaagtgctgggattacaggcgtgagccactgctcccggcctcctgtatttaattttttaaatttcattttccattaaggacatttaagaatatctataaaagctgaacgcaggctgggcacagtggctcacacctataattccagcactttgggaggccgaggcaaacggatcacctggggttggaagtttgggaccagcctgaccaacacggagaaaccccatctctactaaaaaatagacaattagctgggcatggtggcgcatgcttgtactcccagctactcaggaggctgaggcaggagaatcacttttgaacctaggaggtggagattgccgtgagcgagatcctgccattgcactccagcctgggcaacaagagtgaaactccatctcaaaaaaaaagagaaaaaagctaggcacagtgtctcacgcctgtaatcccaacactttgggaggctgaagcgggtgtatcacttgaggccaggagttgtagaccagtctgaccaatgtggtgaaaccccgtctctactaaaaatagtcccagctattcgggaggctgaagcaggagaatcacttgaacccgggggtggtggaggttgcagggagccaagatcatgccactgcactccagcctggtctacagaacgggactctgtctttaaaaaaaaaaaaaaaaaaaaaaactccacaaaagtaagagaatataataatcaaccaccagcaccagtcactcggcttgaacaagtatcaacattttgccaagcttgttttatctctccctggggacatctcttttgattgtctcctttaaccctcccaggagcgattcattagcaagtcaatgactcaactaactggtttgctggtacttgcctggggctaggcagttgggagggttagggaaaaaagtagtttgtaaaggattttcacaggtcccttcgacatcctctaagcccaatttattggttggactagatctgtggctacctggcagggttctgggccccaatcctttactgtaacaatggttggggatataccacgtgccaggcccgggactctgtgctgggtatacagtggtagaatgggtaccttcccattacttcctggctgtcaggactcctttcatatgcagtttcctgagggaagccttcccaaagcccataccggggcaggggcagcagtccccctggcgagggctgttgggtgagaaaggaacctggtgcagaggctgtagtggtcagctgtgggggaggagtgtcctggcctagcccccagggcagccagggatgtaggagctgctctcctctggctccaaagctagctgccctctgattcctcccacaggcaacttctatttttccccatctcaaggcctttcatctgtgtgtatgttttttgaacttctgtgtaagctttttggcttaaataaagggcttggcctgcaaggacaagtaaccagtaggctaaaccattggttcctaagcctgggcggccagactttctgggtagctggtctgaaaacacattgccaactccacccctcacccccactagatcaataaagcagagggggaaatcactaacagtttttaaaaatctctcccaggctgggtgtggttgctctgcctgtaatcccagcactttgggaggccaaagcgggcagatcacttgaggtcaggagtttgagaccagcctggccaacacggtgaaaccctgtctctattaaaaatacaaaaattacttgggcatgttgtcgtgtgcctgtaatcccaggtacttgggaggctgaggcaggagaactgcttgaacccgagaggcggaggttgcagtgaactgagatcgcaccattgcactccagcctgggcaaagaagtgagactccatttccccccccccaaaaaaaaaaatctcccctaaggtgattctaatacagagagctgccttcaagagcacctggatatggtagtctcagtgtgaatggtggtaccatgatgtttgggaaaggcgcctcagtgcctttgcttccttgacacaaaaatgagagggtttctgcctgcattcattagctgctgctcccagcatcacagcctttgtcagcctcctggtgttcctcccacccccatttgccacagtgattcctcccttgttcctcagcagcctctcagatagagccctgttttatggtagagaccggctttccggttcccagcctgtgttttgccatatacatcacagagttcactttgaccttcttcctaccatctccccaaggaccttgagtggagacaagtcacaggttcttttcctgacttaggcacaggctgggcagctggaagggctgcagaaggggcactggcagccactcagtccccccgcgttgccttgcccagcccctcagctgtgcatttttctgggctaagaagacaaaacagacagatgctaggctgccaagtgatctggacaggacagtcttgtgggggagtgtgtggaggggtgtttttctgttcttgaaccctcagccaaagtgggaagtgcctttaggggctaggtgcccacacagatgctgagaaatgcccagactgccctccatgaggctgcctgctcaacaacactccttactttgcttgacccaggtcactgtgacctgcccatttttcccctgcatccagggctgaggtggagaggggcagtgtactcctgcagcacaggtatgggaggaggcagctgtgggagggagggagagaaggacacaggcactgctcctgtgcaaggaagactccctctcactcttcagctggcagtggggtggctgcccagaaccaggctgtctggatcaaacccagcttttgcacttgtgaccttcaacaagtttctgaacctctccgatctgtttcttcaagggagatcatcatataacctgtgtgataggctgagattgaatgaataattagatatgaaatgtgaatagtgcctgaggccaggcgtggtggctcacacctgtaatcccaacactttgggaggctgaggtgagcagatcatttgagttcaggagtttgacaccagcctggccaacatggggaaaccccatctctacaaaaaataccaaaaaaaaagtacctgggcatggtggcacatgtctgtggtcccagctactcgggaggctgaggtgggagaattacctaaacccaggaggtcaaggctacagtgaactgtgattccaccactgcactccagcctgggtgacagagtgagaccctgtctttaaaaaaaaaaaaaaaaagcacagcaaagcagtggaggccctaaagccaggaggcctggttttaaatcccagctctgcactgggaagatgtgtgactggacaagagctttcttctcattgagctcagttctctctagtactttggggacactgccctctaccctccaggcttgtatgcagattaaacataatgcaagtgaggtggctggcatgatactgctatcaaaggtgtttgagtaagtttgttcccttccttcatcccacctagctgttgagcccttccttcttttttttttttttttttttttttttttgagatggagtcttgctttgtcgcgcaggctggagtgcagtggcgcaattttgactcaccgcaacctctgccttgtgggttcaagcagttctctcagcctcctgagtagctgagactacaggcacatgccaccacaccctgctaagcccttcctctctttagggttttcccacagctctagtcaggattcagctcaaccagcgtccactgaagcctgttggtatgtgtgtgcattggagcaccatagtggtgaagaggggcaaataaggaccccagagccagggcccctcctggctggaatggaatgggagagaagggccacagaagcttctggctctgccctgcctatgagccttccagcccgacagcctggtgctgtctttgagtcacctgtggaatagatgcagctgcagttagctaggttaggagaaaagacaggaccagaagaaggacctagagtgtgaaatttcagtcaagccaccgtttagaccacttaatggttttccatggtgctctggcctggttgtcagccctgtccacctctgagctcatcagctaccattcaccggttccttaagccaaccctttcctgcctcagttcagttgcattggaggaccatagaggtgaaggagggcagatgagaaccccacggccagggcctttccttggaattgtctagaacattcttagctttctgtatggctagctcttctaatccttatgtctcagccttccagaacccttagctatgggagtttctcttatctttataatgccccctttattcttgtttctgttgggggcttgttggtggttattcacctaatggttaatagtcagtctccatgactaggtgcactataagctccacagggtggagtgcatgtctgtttaattcacaaaggcatcccagcactgagaactgggcccaatataccaggcactcaaataatatttgaatgagcaagaagccttgaagagcagcaggaaggtgagaagctctaacttgacttttttttttttttttaagacggagtctcactctgttacccacgctggagtgcaatggcgtggtcatggctcactgcaacctctgcctcccgggttcaagcagttctcctgcctcagccccccaagtagctgggactacaggcgcgtgccaccacacccggctaatttttgtatttttagtagagacggggtttcactatgttggccaggctggtctcaaactcctgacctcgtgatctgcccacctcggcctcccaaaatgctgggattacaggcgtgagccaccacgctcgaccgactttttttttctttgagacaaggtctcacgctgtcacccaggctggagtacagtggcacagtcacagctcactgcagcctcaaactcctgggctcaattgatcctatcacctcagcctcgcaagtagccgagactacagacacgcaccaccatacccagctaatttttgtactttttgtagacacagggttttgccatgttgaccaggctggtctggaactcctgagcgaaagccatccgcccaccttggcctcctaaagtactgggactgcaggcgtgagctgcagcacccagcctgactctccaggctggagtgcactggcattatcacggctcactgcagtctctgcctccctggcctcaggtgatcctcccacctcagcctcctgggtagctggggctatagggcacatgccatcacaacagctgatttttttgtatttttgtagagatgtggtttcaccatgttgcccaggctggtctcgaatccctgggctcaagtgatctgcccacctcggcctcccaaagtgctggaattacaggtgtgagccaccgtgcccagccgggggagggtcttcatgtccgggctctggagtctggacttgatcctgtaggcagtaggagacaaatggcagtttgcaacctcctcctcccaggttcaagcaagtttcctgcctcagcctcctaagtagctgggattgtaggtgcctgccaccatgcccagctaatttttgtatttttagtagagacagggtttcactatgttggccaggttggtgtgtgttcttatttaactctgtcttcccactatgaacctctgtgttttcttccatgttctggggtcctgagacatagtaagtgcttcatagctgtttgttttggtttgttttgaaacagtatcttgttctattgcctagactggaatccagtggtgcgatcatagctcattgcaggctccacctcttgggctccagctatcttccgatctcaggctcccaagtagttgggaccacaggggtgcaccactacacctggctaacttcttttgtagaaacagggtctccctgtgttgcccaggctggtcttgaactcctgggcttaagcaatcctcccgccttggccacccaaagtgttgggattacaggtgtgagccactgtgcccagcccatagctgttttagattaagcaaattgatcggtcttgtatattcattccagatatgtaactggttcatcaatgcccggcggcggcttctcccagacatgcttcggaaggatggcaaagaccctaatcagtttaccatttcccgccgcgggggtaaggcctcagatgtggccctcccccgtggcagcagcccctcagtgctggctgtgtctgtcccagcccccaccaatgtgctctccctgtctgtgtgctccatgccgcttcactcaggccagggggaaaagccagcagcccctttcccacgtggggagctggagtctcccaagcccctggtgacccctggtagcacacttactctgctgaccagggctgaggctggaagccccacaggtggactcttcaacacgccaccacccacacccccagagcaggacaaagaggacttcagcagcttccagctgctggtggaggtggcgctacagagggctgctgagatggagcttcagaagcagcaggacccatcactcccattactgcacactcccatccctttagtctctgaaaatccccagtaggcatctgccaagaagggtgctgaaggctccagccagctgtcctgggtttccgttttggttccctttcatacagagggttttctatggatcactgccaaacattgggatcatctcctctgtccagaggtcttcaacaggaagatgccagctggcaccactgcactgtgatgggggccctctcctctgctgactctgccgtttctccaggcctccgctcagtgatgagaccaagagatcggagacaagcatggtgctgctgcttctgctgcttctccagaaaatccctgggacacctttgttccagcctggtttcctgggctgggctcaggaaagctgccaaattcagtcctatgttgggtccaagctgcccctgtgctgtttctgtcaagccaggtgtggacattccaagttcatatgcgtgaacaaaagaaaagaggaacccagtggatgtaacagaaccgactccagttgaatgtttagatttttgctaaactgttttctttttcccttttttgctgtggtttgcattcacggcagtagttagcccaggtgtggggaacgagagtgcactgcatgatagcgttctggtgagctgggaaggacccaccactgccactgaggattgttttggaagaaaggaatatttttatcttggggaccagctaagtctctgcagtagtgtgaaattccaaatggttgttttatcattggtttggtttaccaaaaaaaaggcagggaaaaaaaaaaaaaacaaccgtatgagcgcattggcttgtctgccgcaggcacagaagggtagaaagccacagcagggggcagtccagcagactctgactcaactttctaggcacctagcagagaaagataagatcaaaaggtgtttggtttttcttttaatttttattgtagtttttttgggtgggtgggggaagtaaactagactgaagcgatggattttttttttcttttttttctttagtgtttttccctttgttcttgaacacttttgccctgcagcctcagttttgaattcttttagcaacttggattagaggggcccatatgtcagaagctcccagcacctcctacttgggagaaaagtgagccatctgctggtcaggaagtcctccagagaggcagcttttcccacaatggtggcaggaaactttggggaaagcaggaatggtgtccactgctgcggaggaactgccttcagagaaggtggggctggaaaagggttagaagcctcctagctgggattgtctttgtttcacctttctttaaattagaattacagaagcccctgcccagtgaacagataacgattggtcttatgctcctccctttcccccattttttcttttgctgttttgttttttgttttttgtttgtttgtttgtttttttgagacagagtcatgctctgtcacccgggctggagtgcagtggtgcgatctcagctcactgtaacctccgcctcccgggttcaagcaattatttgcctcagcctcccgagtagctgggattataggcacccgccaccatgtctggcttttagtagagacggggtttcaccatcttggccaggctggtcttggaactcctgacctcgtgagccaccacgcccagcctcttttgctgtttcattgctgacagtgttcaacaatatgccccatctttatatatcctaagaaacactaatcctaggttattgctagccaaaatatttttgtcctgagtagtgtcactgggccaaaagatagatcaggacgacagcctttagttttcctgaaatcaccaggtcaggcacaaggagaaaaggttcctggatactgactaacttgggtgggtggatctagccaggagaaagacagtaacatgtgttctgtactttctgggaagatccctgaagccatcacagaggctccccaacttctgagtcgcccatctgttgctgtgggagtgtgaacggatcgctgaaggagagggagctttgctctctctaggtgggcaagtttcctgggctctctgtgttgcctccctctggcttcttcctcccgtgccctctccccgtgtgccccagggggatcagggatcctcaccctcctgaggcccagtggggaagaatgaacatggcttcatccaggttaactgatgctgccatttgcccagcctcttccatcccagccctgtcagtgagcccaggtctggtgcaactgctgcaggatgcctgtagtagggaactctggaagtgtattgggctgaggtgggattttccctccccacagtgcactgagcaatggagggtggtgagggagccatgctgctgaattctggttggcatttccccattatgtaaaatggggtgttgggtagggcagactctgcttgggtttggttgtaagataaacctggaggagaagcacagttgtcccattgaattatttgagcaaaaactactgtaaataacttttttgtcttttgtcaaataaaatttttttttgtttttttaagcagaaacagggttcttgattgatccaccagggctcagggcccaggcttgaagacaaagcagtcactggcttcttattttgctttacatcttttactctccctctagtagccagctgtgagttctgtgcacgctgtacccccattccctttcaccagctccattctgtatcccattcaactcagggtaaagggggcatttgcatctcacattgggccagtcttccctggaatcaacagttaagctctggggttgctaagtggtgaggatgtaaccttgaggaactggcaactttgtcctccccctctctcggtaagaaacaagcatgactgcagtgtgaacccggcacagagagaagcagctatgagatggaagctccagtcatgtctgaaaccaggaccacctgtaaacttctctattatgtaagctagtgaattcccctttttgcttaaactagctgttaatacgtttctgccatactgaaatgacaatacactaactgcagcccaaactataaaaaccaaggtctgcaacagtgggaaactgagtttggttgagtgtgcctgggtctgggtctgtgctatgttcagtctcttttttttttttttttttttgaaacggagtctctctctcttgctaggctggagtgcagtggcacaatcttggctcactgcaacctccgcctcccaggttcaagtgattctcctacctcagcctcccaaatagctgggactacaggagtgcgccaccatgcccggctaattttttgtattttttagtagagacggggtttcaccgtgttggccaggatgatctcgatctcctgacctcgtgatccacccacctcggcctcccaaagtgctgcaattacaggcgtgagtcactgtgcccagccccaatttcttaatttttgtacacacacacatgaaagtgagatgccctaggtaaagaaactgagtgggctgtggcttgtgcctacagtcccagctactccaaggctgaggctggaggatcacttaagcctgggagtttgaggctgcaatgagctgtgattggaccactgcactccagcctgggtgactgaatgagaccccaagaccccatcgtttttttaatttttttttattctaaaaaaaaagagaaactgagtagggatttcagatacttgcctgaactcatatagcccatataaatatggagctcgaattcaaattcaagtctgttttccttcagggtcactcaggtctgcccagaacctacctgaagtaatatagtggtcacttactaacatagtatcatctagctgtctagaacagtgctgtgggctcagcacaagaagtttcttctgtgaatgaaatcttggtggtctctcctacaggtcactctccttcaggaatttggagagagagcctccccactcaagtttcccagattaaagagcctcagctccctcagccattcacccaaggtcctgattttcccccatttctctctcagtatctctcaaactgcacacttggccctggagctcagcagaataggcacatgctgttacagcttttcaaagtaagtttaatattcaattcacatcggccgggcgtggtggctcatgcttgtaattccagcattttgggaggctgaggcgggcagatcacttttgaggtcaggagttcaagaccagcctagccaacatggtgaaaccccgtctctactaaaaatacaaaaattggtggggtgggaatggcgcacccctgtaatcccagctactcgggaggctgaggcaggagaatcgcttgaaccctggaggcggaggttgcagtgagccgagatcatgccactgcactccagcctgggcgacagagcgagactgtctcaaaaaaaaataaaaggaactgaaaccaaaagtgtcttctgcatcaagcttcaaatgagccctggagtgagcaagcactctagataatgaaagtgaactgcgggataatgtggctagggcccctcctgtgacgctgggaacatgatctaaggacatccaccttttttattagagtctcattcaggaaacagcttttaaatgtatctgccctggtcgtgaatacccgctgtctctttgggctggctatgtatagcctggccgcctctctatacccttgttcttttttttttgagacagattcttgctctgtcgcccaggcttgagtgcagcagtgcaatctcggctcactgcaacctccgtctcctgggttcaagtgattctcctgtctcagcctcctgagtagctgggattacacgcacgcaccaccacccctggctaatttttgtattttaagtagagacggggtttcaccatgttggtcaggctggtctcaaactcctgacctcatgatccgcctgcctcagcctcccaaagtgctgggattacagacgtgagccaccgcactcagcctatacccttgttcttaatagggctaagatgatgcttcaagcttttgggtatcgattttggactttgcattaatattttttttgttttgttttgtttaaaaaggtggccgggtggcgtggtggtgcatgcttgtagtccctgctacttgggaggctgaggcagaagaatcacttgaaccagggaggcggaggttgcagtgagctgagatggcgccgctgcactccagcctggccgacagagtgagactctgtctcaaaaataaaataaaataaaataaaggtaatggtagtgattggtggggaggggatctgccatcctctagatgggtggtcagggaagtcctcttcctttccactgtttttgaatggtagtttctccatggcccccaggcttagaacctttttttttttttttttttttttttttgcctcaacttagccctaggaataagcatctctggggtaagactgaggactctggattttaaaagtacagtctagcttgaaagctgctacatgggctgggcacggtggctcatacgtgtaatcccagctctttgggaggccaaggctggtagatcacgaggtcaggagttcgagaccagcctggccaagatggtgaaaccccatctctactaaaattacaaaaattagcctggcgcggtggcaggcacctgtaatcccagctactcgggaggctgaggcaggagaatcgcttgaacccgggaggcagaggttggagtgagccgagatcgcaccactgtactctagcctgggtgacaaggcaaaactccgtctcaaaaaaaaaaaaaagaaaagaaagctgctacatgaaaactccatatggcagaggccaggtctgccttgtatggctgtatccttgctatgttatgcactagagctgcagaggataaggtgtggcactcgaaggatgcagaaataaccatcactgctgtcagtgttactgatttcaaaggcatttctctatgacccaagcctggtttcaaattcttggtctgtcactgattagctgtcatgaccataggcaagacagttcactactccaaacttcagttttcatcatcaataaagtgggaatagtaatacttacctcttgggaggatgaaataggataatctatacgttactatctatccttgctcagcacacagctgagggaaaaacaacctgtaaaataacttaccccataccacacagcttttaagtggcagaattgggcctaattacccagagaagtaattctcaagcctaaatatccatcaagatcatcaggaaagcttacaaagatgcatattcccagacctcacgcccagagagtctgggcaggaatctgcattcttcactgatgccacatgagattctgatgatcttgctccagagaccttcaccattcattatcaggacactgacctatccccaggaaactactgggctgggaaagtagcaactctttgtctttcaaagttacaagatgagaggaagaagggtctctgaaccatctgacgtctttgctcccaggaggctatggtaacttgaaggtcaagtgtagccctaccattttaattaccaaagtaatccacacacgatgtagagaaattgcaagtaaaggtataaaaagagaagagtttagcataatggttaatggttaaaagcccagccaggttttggatgaaaacgaatgtagccagatgcagtggcttatacctgtaattccatcactttggaaggccgaggcgggtggatcacccaaggtcaggagcttgagaccagcctggcaaacgtggcaaaaccccatctctacaaaatacaaaaattagctgagcatggtggcaggtgcctgtagtcccagctactccggaggctgaggcaggagaattgcttgaacccaggaggtggaggttgcagtgagttgagattgtcccactgcactccagcctgggtgacagagtgagactgtctcaaaaacaaaacaaaacaaatgaatgtaaaacatttagtgaagtgactggtagctagtgagggttcattaagtgctagtatgacatttattgtgggccaaaaagaaaaaaaaagaccaggatgcaatctcagacctccattccaacaacaggtgctctttccatggctgatggttgcccccaggatttctgatacctgtgatccatcagtgcctgtgaggggccagtcttacccctcagaatataccttcctctccaaaccccactccaagcagctggcagtgctatcgaggcattcagctgggaaatagccctaaggctgagctcatgtgttcaactagtactaaacagctacaaactcacaaagacaaaatttgtcctacttccaaatctgtctctcccactttcaaatctgacccttcatcaagttattttccaactcagaccacccaagatgtttattttaaccagacggattcactgagattcagccaggttccccgcttcctaagataaggaaagccttgggtgaaagcaaatagggaacaagtctgagtcccaaaaataccttttagacaagggcttcccctctggctgccagcttagctttgtctgctcctagagaggtaagaggaggaacagggatcaggtttcagatgcctgttgaacttctaacttcccttatgaccttgggctacactgcaggatttgaggacccttccaactagaactttctgtgacctctcccaatcccatgcaaacataatggctcttggagttacggtcagagcttcgcaatgtaatacaaacatgacctagagccggacgcagtggctcatgcctgtaatctcagcactttgagaggctgaggtgggcgtatcacttgaggtcaggagttcgagaccagcctggccaacatgatgaaaccccgtctctactaaaaatacaaaaattagctgggcatagtggtgggcacctgtaatcccagctacttgggaggctgaggagaatcccttgaacctgggaggtggaggttgcagtgagccaagatcgtaccactgcactccaacctgggtgacagggcgagactctgtctcaaaaaaaaaaaaaaaaagaaaaagaaaaaacaaatatgacataaaaaaatactgtctaatgagatgctcaatcattactaatcactagggaagtgcaaatcaaaaccacagtgaaaatactactttgcacctagtaggatgattattaacagcagaaaaaggctgagcacggtgactcacacctgtaatcccagcactttgggaggccgacgcaggcggatcatgacgtcaggagttccagaccagtctggccaacatggcaaaaccctgtctctactaaaaatacaaaaattagctgggcatggtggcgggtgcctgtaatcccagctacttgggaggctgaggcagaagaatcgcttgaacccaggaggcggaggttgcagtgagctgaggttgtgccactgtactccagcctgggcaacagagcgagactccttctcaaaaaaaaaaaaaaaacatgtatctccgaacccttgtgcactgctggtggaaatgtaaaatgccgcagctgctgtggaaaacaacacttcctcaaaaaattaaaaatagaattacgatatgatctagcaattccacttctgagaatatgcccaaaataacaaagcagggacacaaacagatatttgtacactccaattcatagcagcattattcagaatagtcaaagtgtaagcaacccaaatgtctatcagtaggtaagcaacatgtggtatgtacatacaacagctttaaaaaggaaggaaattctaacacatgctacaacgtgggtgaaactggaggacataatgctaactgaaacaaaccagtcacaaaaggacgaatactgtactcctatgagatacccattagaacagtcaaattcctacagagaaagtagaatggaactggtttccagggactggggaaatgggagaatgaggagttatttttaatgggtacagagtttcaattttacaaggtgacaaagttctgaaaatggatggtggtgatggctgcagaacaaagtgaatacacttaatgccactgaactgtacacttaataagtgttgaaatgataaactttgttagatatattttactaaaatttaaaaaacaatttttttttttgagagagtctctcactctgtcacccaggctggagtgcagtggtgtgatgatcacagctcactgctgcctctaccttctgggcttaagcaagcctcccacctcagccttcaaatagctgggactacaggtgtgcaccaccatgcctggctaattgtttttttctttctttttttttttgtggagacggggtctccctgtgtagcccaggctagtcttgagctcctgggctcaagtgatcctcctgtcttggcctcccaaagtgctgggattacaggcatgaaccaccatgccaggcccttaaaaatatttttaatttggttgggtgtggtggctcacacctgtaatcccagcactttggaaggctgaggcaggcagattgcctgagctcagtagttcaagaccaccctgggtaacacagtgaaaccccatgtctactaaaatacaaaaaattagccaggtgtggtggcgcacacctgtaatcccatctactccagaggctgaggcacgagaatcacttgaacctgggaggcagaggctgcagtgagctgagatggtgtcgctgcactccagcctgggcgacagagcgagactctgtctccaaaataaataaataagtaatatgtttaatttaaaaaagaacgggctgggcatggtggctcacgcctgtaatcccagcactttgtggggccgaggtgggtggatcacctgaggtcaggggttcgagaccagcctggccaaacatggtgaaaccctgtctctactaaaaatacaaaaaaaattagccaggcgtggtggcgggcgcctgtaattccagctactcgggaggctaaggcaggagactcgcttgaacccgggaggtggaggttgcagtgagctgagatcatgccactgtactccagcttgggcaacaagaatgagactccgtctcaaaaaaaaaaaaaaaaaaaaaagaactgttgaatccagttttctgcatcttcagtgccctcaccaactctcacctaaatgactttaacagccttttaactagtcccccattctgatccagtcccccaaatagcagcaagcatgatccttctaagatgcaaacctgatggcttcccctacccctggataagaagcaaactcttcagcatgattctcccgtgcttcccctctggtggcttcattccttaccattagcccacatggtttcatttccctaaatgttatctcccaccttcacctccctcttttccttctaatgtcttccttcagagtttacccttccctaatccccccagatcaggttccccattatacatcttcaccagggggagacctggcagagtgaaaacttacctttaggccaagggctagtcattcttccaacattctgtgacagattcattagtttgtcttctgaactacatgccagcagggagtctgtaaaagaggttttgtaacaatggtacacttccaaaccagtcagtttggaagctcttggccctctgaagtttccctgaaaatcagtgatatgaggcagattgattaccaggaaaaaaggcatacaatttgatttaacgtgtatacacaggagtcttcagaatgaagacccagctccccaactccccaataaggtacagaagcttcttttttttttttttagatggagtttcgctcttgttgcccaagctggagtgcaatggcacgatctcggctcactgcaacctccgtctcccaggttcaagcaattctcctgcctcagcctcctgaatagctggaattacaggcacatgccactacgttcggctaattttttgtaatcttagtagagatggggtttctccatgttggtcaggctggtgtcgaactcctaacctaaggtgatccactcgcctcggcctcccaaagtgctgagattacaggtgtgagccactgcacccgaccaggtacagaagcttctgtaccatcttgaggttacagaaagaatgggggcttggatcctggtagaacaggttatgggaagggggagcaaggaattttactgagggacaacaaatgattattaggaagaatggatcagaaacagaaattaacctgtaaatagttatctttggaatttaaattattcttggagacagtcattaccttgaaaaagggtctgttcaggtgtggttacactgtcttctcttctgcaatagaaagcgagatagctgggtgtggtggctcacgcctgtaatcccatcactttgggaggccgaggcgggcggatcacgaggtcaggagatcaagactgtcctgactaacacggttaaaccctgtctctactaaaaatacaaaaaattagccaggcatggtggcgggtgcctgtagtcccagctactggggaggctgaggcaggagaatggcgtgaacccagtcagccgatatcgcgccactgcactccagcctgggcaacagagcgagactccgtcccaaaaaaaaaagaaagtgagataacagggagaggaacaagaactcttctccttggtgggtcagtcatatctttatgtagatacgggaaaagtctcttccagcaccttgattaggttttcaagttcagatattcattatgctaggcacagtgggtcatgcctgtaatcccaacacattgggagaccgaggtgggaggactgcttgagcccaggagttcaagaccagcctaggcaacatagtgagaccctgtctctacagaaaattaaaaaacaaaaacaaaaaaaaacaaacctgtcagggtgtggtggctcatgcctgtaatcccagccctttgggaggctgaggcaggcggatcacttgaggtcaggaatttgagaccagcctggacaagatggcaaaatcccatctctactgaaaaatacaaaaattagccaggttgtggtggtacgcatctgtattcccagcttctggggagactaagtcaatagaactggttgaatctgggaggcagaggttgcagtgagctgagatcatgccactgcactccagcttgggcgacagagtgagactctgtctataaaaaaaaaaaaaaaaatcttagccaggttggtggcatgtgcctgtgcctgcagctccagctacttgggaagttgaggtgggaagatcgcttgagcccagaagatcaaagctgcagtgagccctgatcatgccaccgcatttgagcacgggcaacagagtgagaccctgtcttaaaaactaaactaaaatagtcattatactagggagccatattttggggtaaaatattttgatttccttcaactggctaagctttaccatttcatatgggagggaaactggatcagaaaagaggcagggctgaaaagaacaagacccacggggaaacttaggacaaaaggagtgcacccatataacgtatacggcccttccaccagttccagacagtaacgtgatcacagtatgtttcaccttgggggtccagccccacttaatctactgaaacaatgtcagggtgggcttggggtggaaaacagcagctatagtattctggaaaagctctctaggaggttttttgtttgttttttgttttgtttttgagaccaagtcttgctctgttgcccaggctggagtgcaatggcgcgatcttggctcactgcaacctccacctcccaggttcaaacaattctcatgcctcgagcctcctgagaagctgggattacaggtccccaccaccacgcccggctaattttttttgcatttttagtagagacgggctttcaaccatgttggccaggctggtctcgaactcctgacctcaagtgatccaccgacctcggccttccaaagtgctgggattatgggagtgagccactgcgcctggcctccctagggaggttctattactcctgaaaagtgaagaattacaggtgaatgttgataggtatgcaaaagatactctgacctgtttaaaaaaaaaaaagatactctcagctttaaagtttaacggttaagagcacagattctggagtcagacacacccaggtaccagatacattacttgtctttataaatccactgtccagaggccgggtgaggtggctcacgcctgtaatcctagcactttgggaggccaagatgggcggattgcctgagctcaggagttcgagaccagcctgggcaacatagtgaaacccccgtctctactaaaatacaaaaaaaactagtggagcgtggtagtgggcgcctgtgatcccagctacgtgggaggctgaggcacgagaatcgcttgaacccgggaggtggaggttgcagtgagcagagaccgtgccgtctcaaaaaaaaaaaaaaaaaaaaatccactgtccagaagggatgtgccttggtctctggacttaccagcacagtgagcctggcaccacctggagggccaccggaaggagccccatccccaggggttctgagtcagtaggcgtggaatgggggccgagaacctgcgcctctacccagttcccaggcgatacggccgctgctgatccggaagctcactttgtgaaccactgacgcagcacatggtgaggacgctgtatgtgaacactcagatatcctgatacctaacccaatccttgtatttgccgcccaggagtccccggttgggtccaccttgctatacggcctcagaatctcatttcctcttttggggtctcagggctctcgtgtgccaaaagagggtgctgggcaagatgaaatggttagttattacagaagagttaacatcttcaacaaggccctacagaacttgcagggttaggggagaaaataagcgggctaaatcctgtggggcagcttggagctaccctggagcaaggtctgggctcagcaggcgagtaggtcgcaaggaaaggtagagccgctcctgccccactcgctgctcgaggggcagctgtggccgactgggcgacgctgacgtccagcctcggttttcccctacctcctcggtctccacagcgcctcctggcgcccatgtcaccgttctaccaagattgtccctcccctcacaccttaccgcgagcccggcggatgctgacgtcatttccgccacgagtagcgcgcttgcgccaaggcgccggtcgctgtttcactcggatggcttcgcggtcgccgattggctgcgtgagcacgtcggcgggagggcgcgcgacactgcaccgcccctcccttcgcggcgcctgctctgtagagccggcggaaccgggtagcttggccaggttgtgaggaaccgcagcgcgccgcaggaccgggccgctgagcctgcagccgccccgcgccgtgacctgcgaccctagaccccgactccctttggctcagcccgcgcgccccaggcccggcccgggcggcgcgacgggaggatgagcggcgggcggcggaaggaggagccgcctcagccgcagctggccaacggggccctcaaagtctccgtctggagtaaggtgctgcggagcgacgcggcctgggaggataaggtacggtggagtctgaacagggcgcgggtgcgaggagtcggctgggactcggggaacggaagactggcgcgggcctgccctcgtcctcgttccggcacaatcgagtagggcagtggggcgggtggcccaagggtgtcagagcaaacttggcgggcactgggcggacagctgggcttggagctccccgaagggtggcctaaggatgaagccccctagttatgcggaattggcgaggagcggggagaggcgttgtcattcgcgggcagggtttgtgcctgaactgggaaagggagctgaattcgattcggcctccgccttttatgtgcagtagggttttgagtaggttacttgtttctttcgaattaagtagcacaaacattaacagtaacagacttctgctgagaatgctttctacgtgccaggtgctctgcaagcggaatctcgtttaactcagaataactctgaagtggggtactgtggtacattaaagccttttgcacatagtgaggctcgctaatcttgagctgctgttgcttgttgaatgtaaaggaccgaatactttgataagcatgagtcaagaggggagactgagaccacccgctgggtgagtgtgaggtgtgggggtggagaaacgccaccagatatgtgcgagaattggttgggacttcagaacgttcttactcgtcccattcggaggatgcttcgtaactctgctccatgatctggaaggggccatcacaaacagcttgattccaggtagcttgaaaagcgtattatatttgcagtcatttcttggttttctgggctgccgaagtggattttccttcctgaagttcctgtaaagggggatgggaggcacttcctgaaggtgcccttgttctgcccccagccctgcccagctcttgcaaaacctgcagtctctaatctgctgtgtcatttctttcttttcttgtataaggactggtttctggaatctagggcagatcagaaacctgagtcgtctgtgttcttccattaaacttaaatatagtggcacctgcctccagcatttatggttctaatccgtatgtgcggccagtagcacaattattatcacagtcatttcattacaggccatattatatatgcacctctagaattttgatttagagcacagattctggaagtgatcgcttaatgatgtctaaatgtatctttttttttttttttttttgagacggagtttcactcttgttgccctgcaacctccacctcccaggttcaagcaattctcttgcctcagcctcccaagtagctgggattaaaggcgcccgccacaacacccggctaattttttgtatttttagtagagacagggtttcaccatgttggccgggctggtcttgaactcctgacatcaggtgatccacccgcctcggcctcccaaagtgctgggattacaggcttcagccaccacgcccagcccctaaatgtatcatttctaccacattttagtataagtaagaggtgaaacaggaagcacatactgttgcctttggggggaaacaaatttcctggatatgtttagcagaaaggtttaatattctccccttttgctgtcttgtggcacccactccagataattcttgcattttctgtcttttctacaggatgaatttttagatgtgatctactggttccgacagatcattgctgtggtcctgggtgtcatttggggagttttgccattacgagggttcttgggaatagcagggtaagtcttgggtatcttatattttcatggtatcatttctttttaaatagaggctttttttcctgttacaggaaaggccattgctgctctggagctgtgtgtgtgtgtgatgactaaagcaaagaagcagccctacagtggcactcctgggtctggtgcaccactcctcaggagcatctcaggtcaggcaggttaccttcctgccttcctgaaggctgggccagtccattcattcatgggtctaaagtgacctcatgcaagaggctatgactacttgttcgtggcatgcactctagttctgctgtgacctttgtacctgtgcgagtttgggaagtaggaacttctgtatttgacgaccatttcccttgttcctggcacagtgcttaatgtcctaaaccttggctttggtagaagttatttcaggtccctccattttgtttttttgagatagggccgcactttgttgcccaggtgggagcacactggcaccatcacagctgactgcagcctcgacctcctggactcaaatgattttcctgcctcagcctcctaagtagctggaactacaggtgtgagccaccacacctggctaatttttaaaaattttgtagagacaaggtttctctacatttcccaggctggtcttgaactcctgggctcaagtgatcctcctttcttggcctctcaaagtgttggtattataggcatgagtcagcaggtctggcatcggtctcattcttttttttttttttttttttttttaaagacagagtctttctctgtcgcccaggcaggcgtgtactggcgtgatctcggctcactgcaacctctacctctcaggttcaagcaattcttctgcctcagactcccaagtagctgggactacaggtgtctgcccccatgcccggcttattttttgtatttttagtagcgacggggtttcgccatgttggccaggttggtcttgaattcctgacctcaggtgatccgcctgtcttggcctcccaaagtgctgggattataggcatgagccaccatgcccggctcattgctgttcctagccccctaattgatggtgagctgagggcaggaacagtcatctttacgtttgcatcccgtagcaataacagacagtggatatccagaaatggtctcccactgggagttatacagggggtatactgttgcttgctcaactaggctacgaagcagcagcttcacatgtttttctcccatagccacaccctagctggagctacctggaggcccatgtcaggtcccgcttgggatggcttatcagccattctgttacttcaaggggctttggagaactatattacacacacacacacacacacacacacacacacacacacgcacacacgcacacacgcacacacgcacacacacacacacacacacacacacacacacacactatatatagagtttcgctgttgcccaggctgtagtgcagtggaacaatttcggctcactgcaacctctccgcctctgggttcaagcagttctcctgcctccacctcctgagcagctgggattacaggcgcccaccacaatgccctgctagtttttgtatttttagtggagatggggtttcaccatgttggctaggctggtcttgaactcctgaccgcaagtgatccgcccacctcagcctcccaaagtgctgggattacaggtgtgagccaccacacccggccccgagttctgagtcttctaagctttcaatttatgtttggtacttgttctctgttgctccagattctgcctgatcaatgcaggagtcctgtacctctacttcagcaattacctacagattgatgaggaagaatatggtggcacgtgggagctcacgaaggaagggtttatgacctcttttgccttgttcatggtatgtgtagctgatagttttacaacaggtactgttcatttcatgaggtgtcactcacaggaggggaccccactgattgagttacactgtgtgagcagggtgctatttttctaaaggcttctgaggctcagggccatggcctgtgttgagccacatcccagaagatgtggtctgatatactgtacagtcccctgtaatgtgtaaatccagggcccatcgtcagcttctacatctgattctcaagcctggctagatattagaaactaggagggctgagcatggtggctcacgcctgtaatcccagcattttgggagggcaaggcaggaggatcacctgaggtcaggagttcaagaccagcctggccagcgtggtgaaatcccatctctactaaaaatacaaaaaattagttgggtgtagtggcgggcgcctgtaatcccagctactccggaggccgaggcatgagaatcgcttgaacccgggaggcggaggttgcagtgagccaagatcgcgccatcgcattctagcctgggcaacaagagggaaactccatctcaaaaaggaaactaggaaatatttttcataatagctaaaaagtacaaacagtccaaatgaccatcacttgatgaatggataagatactatgtatccatacagtagaatgttatttggccttaaaaaggaatgaagtggccgggcgcggtcgctcacacctgtaatcccagcactttgggaggccgaggcgggcagatcacaaggtcaggagatcaagaccatcttggctaacatggtaaaaccctgtctctacttaaaaaaattagctgggcatggtggcgggcgcctgtagtcccagctacttgggaggctgaggcaggaaaatggtgtgaacctgggaggcagagcttgcagtgtgccgagatcgcgccactgcactccattccagcctgggcaacagagcgagactccgtctcaaaaaaaaaaaaaaaatgaagtcctgatacatgctatataacatggatgaaccttaaaacatcatactaagtggaagaatccagacacaaaagaccatgtgttgtgtaattccatatgcaaaatctccacagtgagcaaagccatagaggcaaaaagtagattagtggttgccagtggctgggaggaggggatggagagtagctgataaaggaaacaggctctttttggagtaatgttttggaatcagtggtgatgtttgcacaactgttcctatacagaaagcctctcaactgtacgctttatttttttgacacaggctcaccatttcacccaggctgtagtgcagtggcgcagtcttggctcactgcagcctctgcctcccatgctcaagtgatcctcccacctcagcctcccgagtagttgggactacaggtgtgagccaccatgcccggatattttttgtatttttagtagaaatggggtttcatcatgttggccaggctggtcttggaactcctgacctcaggtgatctgcctgcttccgcctcccaaagtactgggattacaggtgtgagccactgcacctggcccatttttttttaaattatactcatggcctggcatggtggctcatgcctgtaattatagcactttaggaggctgagacaggcagactgcttgagtccaggagttcgagaccagcttgggcaatatggtgaaacccatctctacaggggaaaaaaaaaaatagctaggagtggtggtgtgtacctgttgagtcccagcaggactcaaaaaaaaaaaaaaaaaaaaaaccacaaaaccttatgtgtccagactctaacccaaaccaataaaatcttttgagatgtagtgctggggcatctatatgtttttttaaaagaaccaagagattacaatgggtagccaaggtttgagaatccctgctttgatatgcagctgacaagttatagtattttcacattggtagtcgcagcacctgctagcagtgtaatatgctttacttgaatcatttccacatctgcacctcaattccctgggcctggggttgccatttggtaggggaggagcttatcaggagttcctttgcaagtgcaggagggcagtcctgggttctgttagtgacagcgtgatttcagtgaaataatttagaccccccaagcagactgtgcaacggatagcccctggagagtgccccgtgtttacattctcatctggcatttttgttttgtggaatcggcctgtgttaagccaggtgacctatgaacagtgcttgtctcctcactaggtcatttggatcatcttttacactgccatccattatgactgatggtgtacagctcccaagtgctccctatccagtccaaaggaccctcttgattacagcacaggaacttgatcgttggggaaccccagccccttggaacttggaagacccgtgtttcctggaccgcgaatcagtgtgttgggcatcagtgttttctgcaagggttgtgacctgaaactttttaaaaaccacccacctttggggaagcatttctgaatttatccatcaccaaccatttcttcttggataccatcaagtaacagctattatttgccaagtggagctgtcatttaatttgatgcacctctggattcagatgaaacattaaattgtcttcctcgattctccatcgggtgtagagtttttaaactatcaatggcatttcaagtcttctgaaacagcatggctgtatgtgcgtggtccatagcacagtacatgcagcatctaataagagtttccattgtagaatgttttcacatacttgaataaatcaaatctttaattgagaacctgttgatgatacctgataaagcctttcccaccccacctgtagcttgggaaccagtaggagcactggagggggtgcctcccaccccatccctctttcttcctctccctgatcccttagcggatccagcagacctctttctgtttatggaggcagcagggaaatcaagggctggatttggtgtaggctgtggtctccgtcttggcattgtggagagagggcttagcaccttctgatgcccctgcccagcactgaggtgcctggcctcactgcagtgtgctagacttaagaggtgttattttttattcggccacaagatggcaaggccagtgtgctagggaatggtaagccacaaaatgaaatagagatctgagagctaggctgggtgccgtggctcacacctgtaatcccagcactttgggaggccaaggtgggtggatcacctgaggtcaggagttcgacaccagcctggccaatgtggtgaaaccccatgtctactaaaaatacaaaaaaattagccaggcatggtggtgtacgcctgtaatcccagctattctggaggctgaggcaggagaattgtttgaatccaggagatggaggttgcagtgagctgagatcgtgccattgcactccagcatgggcaacagggcaagactccgtctcaaaaaaaagaaaaagagctggggctgttgtcctcaatgggggacatttgaggacctagactgtccgaagtctttctctttgctctggaggtcacatagagcctggaccatccaagatctgctgctacggtaagacatcatctcagctttcctttcccttctaggccacagtcctaccttctgaggtatggtggtggtctcaacgagacttgtagattttctgaaaatgactttctcgttgactctaggggttgtttctaccttgtgggtggggcctggttaatggtggggatgtagaatggggctcaacaggcagggcatccagatggtactggaaaccccaaactcaagaactaactaggtcagaccccccaggaggcttattctctttttggaaccctggccctggtcccaccttctctgcactcgcactagaggtcgcaggtgggatcatggcactggaaggaagtaggtgacttctaagggctaagagaggaaagagcaagggtacaggtgggaccctagatgcacctctgtgtcccaccctccctccctgagtgcacagccttgcctctggggtgcccaggaggctgaattggggttctaggtgtgcagccttggtttcccttttggcctctcctttgggcctaggcatcatccaaagagacagcctcgtcattcaggctgatgtagaagctgagggactcccggagaccctcactgagaagagactcctcccctgtggcagcttcagaaaacaggagggagctgtggacaaaggaagataattgggtcaagaagcctcttcctcctccctgtactcactacacacaaaattgcactgttctcaaaacccttcactcctgctgaggacctcatggggctcccctgttccctatcagatcagcttccccagccccacctgtcgagcctgggccgtgctccaggagttgagtcagtgcactctggctccagctgccaggtgtccctgagtgtgacaggtacattccgggttgtggcttcccaggggtgggtccttctaactcttggtcctgctttcatgtttccaggagtccccaactttacctgtccagctctttccagttgagtggtgtcctctgcacagtcacaggtaggggtatatccttgccagggagcgggccagccctctgcaggacacagggctccttgagtaggcagcagatgtcatccgccagctctgaggaagagacctccatccctgacatgactgactccaccctacttctccccaacagccctcaccctgacagccctctgcagttggcaggagggggcatggttaccaaagagtgataggacatgagccccaagctattggtttcatggagacagatgtagtcaaaggtctttctgggctaacttttgggagacagtcactgtatgatttagggtgagttcatggacctcttgagctcaagtttctggttaggaaattgctttgggaagaagaaagctaaggaatgctcagtctacttctactcactgtctacttccacacagagtgacctgcagaaaacccctaatgagttttcacaagagtgctcttccctctctgccccctgacgctgtgcccagtgactgcatcttccagtgtctgttgaaggacaggcaccaggaagtactaaggagagtcaggattgaatcccacacagcagcagctctgtgcccggttcctgtggagagaactctgcctgctgccaggggctctgagtcagaaccagagtggtaggcaaggtactgacctgagcctacacaggaggtctgtggcttttctgccagggcacgaggtgaagacagggctcccagcctgcatttcttggcatagggactggcgtgaaaataggggaggccgctcttctgtctgtctgaatactccacagtaggtaaaatatccaagggcaccactgcctgctcctccccacagactatcccagcctagtcctggaggcagggaaaggccataccagagtaatggtccaccagggcctggagtgaggggaaggtgaggcgcggtgagatgtacagccagccattgtcaaggcagtggatcctgtagtgtctgatccggtcccaggatgcagggcggctgaggcggactgacagagagtaagagcctgaggagaaaggggtccaggggtggcactgaggccctgctgggactcggccccacctaggctgggaaacgaagataggcaacgtgaccatggggccccggcagaagggaagtgtctggggcagaagcaggacaaagacttgctctcttggtcatcaataatatgttcataatagatgggggtcttgtgagggtgaaatcaaatcacacacagagccctcagtacagggtctggcactgtgtgagtgaacattcagcgttggctgttcttacaaagactcaggtggcagatatgttaggatgcaaaaacactgtcaagaagatgctggcaaggaagtggagaagtaggacctcccaccctgctggtggaagagaaattagtacgagccaccttggaaacagtttggcattaactagatgagctgaacatgcacgtaccttacaacccagcagttcttcccaggcacaatacctcagaagcacacaagcaatatgcacagcggcattgtttgtaaaagtcaaaaacggcaaacagcccgtttgtgctcaagagtagaataaattgtggattatagagtgtagtgctatacagcagtaaaaattaataactgctacatataagcataaggaaatcttggaaattaagcagaaaaacattacagagcatacattcagcctgattctatttaaagttcaaagatagccaacatgacattatatgttgcacaggcacacacggcaaagctctgaagaaaagcaactgaatgattaacacagtgaagcatgagagggggctacaaagggcttgttaggtaatttcagctggcaagtgggcgcgtggatgtcagttttattagtgctgctcaacctacatgtatacattacatacactgatgaatgacagtttcaccagctttgcatgtttcattttttcattttttttttttattttaattttctttttttttttttttggagacagagtctccctctgttgcccaggctggagtgcagtggtgcaatctcggctcactgcaacctccgcctcctgggttgaagtgattcccccgcctcagcctcccgagtagctgggactacaggcgcctgccaccaccacgcccggctaattttttgtatttttggtagagacagggtttcaccatatttgccaggctggtctcgaactcttgacctcgtgatccgcctgcctcagcctcccaaagtgctgggattacaggcatgagccaccgcgcccagccagattttaatttatttttagagccatgctctcgctctgttgcccagatggcgtgcagtggcatgatcacagctcctgggctcaaacagtcctcttgcctcagcctcctgagtacttggaattataggcgtgaaccaccccgtgcctggccatataagcacatttaaaatattaaaacaggctaggggcagtggctcacgcctgtaatcccagttcgagaccaccctggccaacgtggtgaaaccccatctctactaaaaataccaaagttagctgggtgtggtggtgcacacctgtagtccgagctacttggaaggctaaggcaggagaatcacttgaacccaggaggcagaggttgcagtgagccgagattgtgccactgcagtccagccttggcaacagagcaagactctataaataaataaataaaaaacccaaggccggggacgggtgcagtggctcacgcctgtaatcccggcactttgggaggccgaggtgggcggatcacctgaggtcaggagctcaagaacagcctgaccaatgtggcgaaaccctgcctctactaaaaatacaaaaaaaaaaaaaattagccaggtgtggtggtgtgcgcctgtagtcccagctacttgggaggttgaggcaggagaattgcttgaacgcaggagacaggttgcagtgagccgagatcacaccactgcactacagcctgggcaacagagcgagactccatctcaattaaaaaaataaataaacaaggctgggcagagtggctcatgcctgtagtcccagctactctgaaggctgaggcagggggattgcttgagcccgggaggtgaaggttgcggtgagccaagattgtgccactgcactccagtctggatgacagagtgagaccctgtctcaaaaaaaaaaaaaaaaaaaaaaaattaaaacaaaagttaatgggccgggcgcggtggctcacgcctataatcccagcactttgggaggccaaggcaggcggatcacaaggtcaggagatcaagaccagcctggctaacacagtgaaaccccatctctactgaaaatacaaaaaattagccaggcgtggtggcgtgcgcctgtaatcccagctactcaggaggctgaggcaggagactcgcttgaacccaggaggcagaggttgcagtgagccgagatcagccactgcactacagcccgggcgacagagtgagactccgtctcaaaaaaattagtccaggcgcagtggctcaagcctgtaatcccagcactttgagaggctgaggcaggcagatcacgaggtcaggagatcaagatcatcctggctaacacggtgaaaccctggctctactaaaaatataaaaaattagccgggcgtggtggcgggcgcctgtagtcccagctactcgggaggctgaggcaggagaatggcgtgaacccaggaggcagaggttgcagtgaggcgagatcgtgccactgcactccagcctgggtgacagagcgagactccgtctcaaaaaaaaaaaaaaaggctaaaagtaaaaagatggaaaaaagatatatcatgcagacaaccataagtaagctagaatggcttattaatgggagaatgttagtgggatattaatatcagacaatagaattcaaaagactggagtgcagtggcatgatcttgactcaccacaacctccgcctttcaggttcaggtgattctcctgcctcagcttcccaagtagctgggactacaggcacgtgccaccatgcccggctatttttttgtttttttagtagagatggggtttcactatgttggccaggttggtcttgaactcctgaccttgtgatctgcccaccttggcctctcaaagtgctgggtttacagctgtgagccactgtgcccggccaacaaatttaaaaggattgaaatcattaaaaatatgttgtctggccacaatggaattaaattagaaattaataaggaaaaggtatctaggctgggcgcagtggctcaagcctgtaatcccagcactttgggaggcagaggctgttggatcacctgaggtcaggagttcaagaccagcctgaccaacaaggcagcctgaccatctgtactaaaaatataaaattagctaggtatggtggcacatgcctataaatcccagctacttgagaggctgaggcaggagaattgcttgaacccaggcagcggagattgcagtgagccgagattgtaccatttcactacagcctagggaacaagagtgaactccatctcaaaaaaaaaaaaaaaaaaaaaaaaaaaagtatctagaagccaggtttggtggctcacgcctgtaatcccaacactttgggaggttgaggtgggcagatcatttgaggtcgagagattgagatgcgtctgactaacatggtgaaactccatctctacaaaaaatacaaaaaaattagccaggcttggtgccagtaattccagctacttgggaggctgaagcaagagaattgcttgaacctgtgaggtggaggttgcagtaagctgagatcacgccactgcactccagcttgggcaatggagtgagactctgggggaaaaaaaaaaaaaaaaaaaaaaaggctgggtgcggtggctcacacctgtaatcctagcactttgggaggctaaggtgggtggatcacctgaggtaaggagttcaagaccagcctggccaacatggtgaaaccccatctctactaaaaatacaaaaattagccaggcatggtggcacacgcctgtaatcccagctacttgggagactgaggcaggaggattgcttgaacctgggagcaggaggttgcagtgagccaagatcacgccactgcactccagcctgggcaatatagcaagactctgtgtcaaaaaaaaaattggagagactgaagtgggagggtcacttgaggctaagaattaaagaccagcctggtcaacatagagacccccttcccatgtctgtacaaatttttttcttttttttttttttgagacagagtctcgctctctcacccaggctggagtgcagtggcgccatctcggctcactgcaagctctgcctcctgggttcacgccattctcctgtctcagcctcccaaatagctgggactacaggtgcctgtcaccacacgtggctatttttttttgtatttttagtagaaacggggtttcaccatgttagccaggatggtctcgatctcctgaccttgtgatccacctgtctcggcctcccaaagtgctgggattacaggtgtgagccaccgtgcctggccaaaaaaaaatttttttttaattaaccaggtgtggtggtgtgagccgatagtcacagctactcaggaggctgaggcaggagaatcacatgaacccaggaggcagaggcaattattatgccactgcactccagcctgggcgacagagcgagattccacctcaagaaaaaataaaaacaatgctgggcgcgatggctcacacctgtaatcccagcactttgggaggccgaggcgggcagatcacgaggtcaggagttcaagaccagcctggctaacatggtgaaaccccatctctactaaaaatacaaaaattagctgagcgtggtggtgggcgcctgtaatccagctactcagggagctaagaatcacttgaaccgaggaggcagaggttgcagtgagccgagattgcgccactgtactccagcctgggcaacagagcttgactctgtctcaaaaaaataaaataaataaaataaagaagatacagaagaatataatttgagagacctctgaaaagtatggcaagattaaaaccatagaagttatggaagacaagcagagtcgaaaaaaggatttgcttttgtaacttgatgatcaagatatagtttttaaaattgttcagaaataccacactggcttttttttttttttttttttttgagacagagtctccgtctgttgcccaggctggagtacagtggtgaaatctaggtttactacaccctccgcttcccaggttcaagggattctcctgcctcagcctcctgagtagctgggattacaggtgtgcaccaccaagcctggctaatttttgcatttttagtagagacagggtttcaccttgttggtcaggctggtctcgaactcctgacctcgtgatccacccgcctaggcctcccaaagtgctgggattacaggtgcgagccaccacgcccagccagaaataccacactgttaatgggcataatggtgaagtgaaaaaggcccttactaaataacagaggtagcctgctggatggtaagtagtcgtggaggtggatctggcaattttacaggttacagaggaaactttggaggtagtagaggtaattttggctgcagtggaaactttggtggaagagaagactgtggtggtggagatggtggcagcagaggtagttatggaggaggtgatggtggcatcaatgatggtgagcctgcttatagcagtagacggggctgctgtggtggtggagcaagatatgaaaaccaaggtggtggatatggtggcggtggcggaggatatgatggttacaatgaaggaggaaattttggcgctggtaactatgctggtgatgggaactataatgattttagcaattatagtggacaacagcaatcaaattatggacctatgaaaggaggcagttttggtggaagaagctcaggcagtccctatggtggtgcttatggatgtggtggtgtaagtggtagatatagtagcagaaggttctaaaaacagcagaaaaaggctatagtgttgttttttttttgagacggagtcttgctgtgtcaccaggctgaagtgcagtggcgcgatctcggctcactgcaggatctctgcaggagaatcgcttgaacccgggaggcagaggttgcagtgagccgagatcgcgccactgcactccagcctgggtgacagagcaagactccatctcaaacaaaacaaaacaaaacaaaaaacaaaaactgaacatcacttgcttaacaatgaggataaatgtaaaattaaaatttattttaaaaataagaactaaacattggccagggacaatggctaatgcctgtaatccaagaactttgggaggtggaggtgggagaatcacttaagcccagccaggaatttgagacaagcctggataacatggtgagagtctttctctacaaaaaatttaaaaattaaccaggcatggtggtacatgcctgtggtcccagctactccagaggctgaggcaggagaatcgtttgagcctgtgacgttgaggctgcagtgagccatgactgtgccactacactccagcctagccaacagaggaagactctgtctcaatcaatcaatagctgaacattggctgggtgcggtggctcacacctgtaatcccagcgctttgggaagccgaggcaggtggatcacctgaggccaggagttcaagaccagcctggccaacccatggtggaagttgcagtgagccaagatcatgccactgcactctagcctgggtgacagagcaagacttgatctcaaaaaaaaaaaaaaaaattagctgggcatggtggcatgcgcctgttgtcccagctactcaggaggctgaggcaggagtatctcttgaacccgggaagcagaggttgtggtgactcagcctgggcaacagagcgagactccatctcaaaaaaaaaaaacaaaaaactgaaaaaccacgatcacctgaaaaaatgcagaaaaatcatttgacaaaattcaacacccttcatgattaaaaaaaaaaaaagcagaaaacgatgaatagaatatgttagtttcctattgctggtgtaacaaattaccatcaattcagcagcttaaaataacacaaattattattttacagttctggaggttagaagtctgaaatgagtttcactggacaaaaatcaaggtgtcagcaaggcaatgttccttttgcagactctagagaagaaatccattcccttttccagtttctagaagccatatggatccctctgctcatggccccttcctcagtcttcacagccagtagcatcttcctgtctctaactctcaccctcctacctccctctcgtaagcatcctggtgattatattgggtccatctggacaatccaaaataatcttcccacctcaaaatccttaatcacatctgcaaactctttttgcaatgtaaggtaacatattcacaggtgctgcagatcaggacctgaacattgttgggggggatgatgattctgcctaccacagaagagtacctgatacaaagcatctgtgaaaaatctacagctaaggctaggtgcggtggctcatgcctgtaatcccaacactttgggaggccgaggcttgctgatcacctgaggccaggagttcaagaccagcctggccaacatggtgaaacccccatctctacaaaaatagaaaaattagctgggcatgatggcgtgtgcctgtaatctcaggtactccagaggctgaggcaaggtattgtttgaaccaggaggcagacgttgcagtgagccgagatcaggccactgcactccagcctgggtgacagagtgacattacatctcaaaaaaaaaaaaaaaaaaaaaaaatcgacagcatgcttaataggaaagattgattattttccatctaagattgggaacaaagcaataatgttcttaccgcttctactcagtgttgtactaaaggtcctaacaagtgcaataacacaagaaaaataaatttaaagtatatggattggaaaataatacagctgcctttacttacaggtaatacaatcatatgtagataatcataaggaatctgccaaaaagctactagaactaaaagtaaatttagtaaggtgacccagagtcaatatgctttgagaagtgtattgaccccagtagggtctctgcttcgttttctttgttttctttgcctgactgggagccctttgacctttgtacctttattttttttttctttttcttttttagagacagtttcactgtgttgctcaggcaggcctcaaactcctgggcttgagtgatcctgttgcctcagcctcccaagtagctggggctataggtgtgcaccaccacgcctggcctgtattctgtacctttgagaagagtctcttcttgagctgtgctgtaaccctaaaaaattctgtggctgggaatgcgctaaatatttgaaaataggcccagaaggccaaccaacccagctgaactagtgaccaagaccttataacttttgcatggttcttgaaccacccaccccagccactgtcacgacagttattagaatcagaaagggtagctacacttgggatctggttggtggtctcagggataaagaggtcaggagtcatccattcctgattgcttcctgtctcagcctcacatccagcccaacagaaagccctgttgggtgtggtcagaacacagctaagatccaaccacttctcacctggagagagcctactacggcttcctgcgcggcatcctctcttctcagcaggaaggaggggtcaggtcgtctcatgcccctactcagaatcctccctgtcacacttaaaatcaatcccaagtcctctccctggaaaggctctgtgtgacctgactctaaactcgccactcccctcatcctgtcttccctgaccgcctgctgaggacgcgcctccctgaggcctgtactcacactcacaccctggcactctgtgtcctctgaacgctgctttgtttcctcttggcacttatcactctcacactcttttcttatttgtttactgtccaccttgccaactagattgtgggcaggaatcttgcttttcatactgcagaatctcgtgttttgaacagtgcttggcacaaagtcagcacacagtatctatttgttgaatgaatgactgagtctctgtgataaacactcggacggagccacgattacaagcagttttaaggagagctcatcaccatttgcactcctactgtctgtgagcacagatggtgttgggaatgattcttgaaggcctatcattgcatgatttgcagcaaacacatattgagcatttactaagacctacccttccctgaggacagagggcccacccagagccagcccttagctgaagacggagtgctgtggggcacacaggtccagttgactgacaggggagcaggtcactaggggtgatgaggaggtgactttggttctgtccttggaactgatgctacaaacagcctgaatcttcctgtttggggggcagtctctcccagctcttcatcctctctccccctctcaacatgcataggtgtactcacctgctcattcatttattcagtaaacatctgctgagcacccaccacatgctggacactctgctctgggcccagacacaggtatgaaatcatcacactcggggaaataagtgctgtcttgtcagcacatccacagctgggattttccttaatggtcctcatttcaagtatttagttcctgtattattctcatcagaccacgtaccctgatttttttttttttttttttttttgagatggagttttgctcttgttgcccagcctggaacacaattgcatgatctcagctcactgcaacctccacctcctggtttcaagcaattctcctgcctcagcctcctgaatagctgccattataggtacctgccaccatgcctgtctaatttttttgtatttttaatagagatggggtttcaccatgttagccaggctggtctcgaactctgtcctcaggtgattcccccgcctcggcctctcaaagtgctgggattacaggcatgagccactgtgcccggccatgattttgttttaggaaataaatttagccagctgtggtggctcatgcctgtaatcccagcacttgggaagtctaaggcgggaggatggcttgagcccaggagttcgagaccagcctgggcaatagagtgagatcctgtctctacaaaaatttaaaagttaggcatggtggtgcacgcctgtagttccagctactcaagaagctgaggtgggaggatcacttgagcccacaagttcaagactgcagtgaaccatgattgtgccactgcactccagcctgggcaatagagtgagatcctgtcaaaaaaaaaaaaaaaaaaagctgggtgtggtggctcatgcctataaacccagcactttggaaggccaaggtgggcagatcacctgaggtcagaagttcaagactagcctgggcaacatggccaaaccctgtttctactcaaaatacaaaaattacctgggccagacatggtgggtcacgcctgtaatctgagcactttgggaggccaaggtgggtggatcacttgaggtcaggagttcaagaccagccagggcaacatggcaaaaccctgactttaaaaaaaaatacagctgggcgcagtggctcatgcctgtaatcccagtactttacgatgccaaggtgggtagatcacaaggtcaagagatcaagaccatcctggccaacatggtgaaaccctgtctctactaaaaatacaaaaattagctgggcgtggtggcacgcacctgtaatcctagctactcgggaggctgaggcaggagaattgcttgaacccaggaggcataggttgcaatgagccgagattgtgccactgcactccagcccaatgacagaacgagactccgtctaaaaaaaaaaaaacacacacaaaaattcgcagggcgtggaagcattcacctgtagtcccagctactcaggaggctgaggtgggagaatcgcttgggcctgggaggtggaggttgcagtgagccgagatagtgccaccgcactccagcttgggtgaccctgtcttaaaaaaaaaaaagtctgggcgcggtggctcatgcctgtaatcccagcactttgggaggcccagacgggcagatcacaaggtcaggagatcgagaccatcctggctaacatggtgaaaccccatctctactaatacaaaaaattagccgggtgtggtggcagccgcctgtggtcccagctactcgggaggctgaggcaggagaatggcgtgaaaccgggaggcagagcttgcagtgagccgagatcccgccaactgcattccagcctgggcgacagcaagactccatctcaaaaaaaaaaaaaaaaagaggaaaagaaaagagataaacctattatagctacagaagaggtattttcaagatgctatgggagttgagaacaaaaattgacatagtatgggaaggcgatagcctgggtaggtgatagtctgggaaggcgatagtctgggtaggtggtagtctgggaaagtcccactggaaagaatggcgaaggatgagtgtgagcttgccgtgaggagaagcggagggcaggctttccagatggagggaggggtatgtgtaaggatgcagcggtagaaagaacaaggtgtttacagagtggctggtgggcagagggtccagagggaacagtggaagctgtggctggacgcggagcctagaggaggacccaccagaaagaaaggccaagtataaggtcctaatttcagaaagctccagcaggcttaggcaacatcacctccgggacctctggggtcaggtattccagtgatgatgctgggagtgagggatgagggatcagataaggagctgcatgtgagaagtgggcctagcaggaccctcctgaaccttctctgctgaggcctctaagaagctttagggattgaatgttgcaccctccactgtctgcaccctgaggacaaaagccatgacttagcaggcctgactcggaggagatgctcagtaagtgtttcccaactgacagtggacagaggtgagccctgcaggggcaggaaccacgtcttgctcatcaatctcccttatagtgcctgacacagaacagatatacagcaggacagcgcagaggggctgctgctggggcctgtccctaaccctgtgctgacctctgcacaatcctgtgacctccacaaagcttctaggcccccttcacggagcaagatttggggcctgactagagcctggccatggctgtcccgaggcctatcatatagccaggtatgccagaaggacttgggaagatggggtcttcctgctccggactctgattagtgttcctggtagctcagggccccaggccttcctccttggtccacatgcaggcttgaagctcgtgtggaatcagtgcctttgggccaatgaaaagctgatcctggcatcactcactcacttggtcaatggctaattcccattatatacgacaagagcataatgtaaagtacattgtctcttattacttcattctgggttccctagattggaactctgttttcaaactcaagagaacaatagaaccatccagagagcctgtccaagaagcagatttctgacctctgcccccaaaagtctgattcagttaggtctgcggtagggcctacaagtctacagtgtcaacaagttcccctgatgagtcctgtacactcaagtctgagaaccactgttctatgacgtcacttgggcccctagagtcactgtggtgtcaaaccacagtataaaagtttacactgtgacgcaggacacaccttatacaaaatctgaaacaaaagttttatgacgcaatgtttaccccaaccatggtcatgttctctgctcaatttcactacaaacacgcactggtccagacgcactaaattagtgggttccgaccctggctacccatcagaatcacctgggcagcttttacagtgtgcaggccacatccctgaccagtgagatcagaaaccctggaggtggggtacaggcatcagtgttgatttattgaatttatttatttatttgagacagggtcttggtctgtcacccaggctggagtccagtggtgtgatcatagctcactgcagcatcgacttcttgggcttaagtgatcctcctgcctcagcctcccaagtagcttagacaacacgcacatgccaccacacctagctaacttaaaaaaaaattttttttttttaagagatgggggtctccctttgttgcccagactggttttgaactcctggactcaagtgatcctcctgccttggcctcacaatgtgctgggattacaggtgtgagacactgcacctggcccctaaactgatttcttgacccacaaatcaaccatgacccgcaggaaaattttacctttcctggaaaattggcaaatttcttctttcttttctcctcccccaactaacatttttcatcttcctctttgataacaatagctgcatcctgatccatctccttttggaattgactatggggacctggagaccttagtcccggtaattatgaggattttttttttttttttgagacatagtctcgctttgtcacccaggctggagtgcagtggtgcgatctcgtctcactgcaacctccacctccaggttcaagcaattctctagccttagcctcctgagtagctgggattacaggcacctgccaccatgcccggctaatttttttgtatttttagtacagatggggtttcgccatgttggccaagctggtctcaaactcctgacctcaggtgaggccttatgtggatcttatgagtctttaaagatcttcatggatcccgctgggcgcggtggctcatgcctgtatcctagcactttgggaggccaaggtgggcggattatctgagggtcaggagtttgagaccagcctggccaacatggcaaaaccccgtttctactaaaaatacaaaaaaaaaaaaatagtccggtgcagtgccttactcctgtaatcccagcactttgggaggccgaggtgggtggatcatctgaggtcaggagtttgagatcagcctggccaacatgatgaaaccctgtctctactaaaaacacaaaaattagttgggcatggtggcatgtgcctgtcatcccagctactcaggaggttgaagcaggagactcgcttgaacccaggacgtggaggttgcagtgaaccgagatcgcaccactgcactccagcataggcaacagagtgagactctgtctcaaaaaagtataataattatcccggtgtggtagcactcgcctgtaatcccagctaccagggaggctgaggcatgacaatcacttgaacccaggaggcagaggctgcactgagccaaaatgtgccacttcacgccagcctgggcgacacagtgagactctgtctcaaaaaaaaaaaaaaagtctccatacggctttctcttctcactcacagagttttctctttgcatctgtgtctttttaggtaaggggcagagtggccataagggccagccactatattcttggggctgacccaggccagagaatgggccaggggaggggagctgagcactgagcacttcctgtggcttctgaagctccaggggacagtctgcagtggggccctgctccactccgcaacgctgctgtggtttcctgtttgcagctgctgtgctgggctggcctccccagcccctctaccagcctatggatgtatgtgaggtgggggtgctgatgctgcctagaaaatagcaggaggggcctcagagaggtcaacccaagaacgcccaagggcaggagaggagagacaaagaagctggaaagggtcctgggagggagactgaggcagagaacgaagggtcccgacagcctatcacagttggttcatatcaaggcgggcgccaggaggtctgtccattcctgatacctccttccctggtctgttgctatgcttgcagtgccaacattactgccccacgtgggcctttcttgggggcctggagtgagaggaggtgtggctgggtttgaatcctggctctgcacttactagctgtgtttccccaggcaaattatttctcttccctaagcctcagtttttccatctgtaaaatgaagacaatggaagtacaatccccatacattgttttaagtcacttaaagggcttaacataaacgtgggggctgctgctccttcaacatccctctttgcctctgccttaaaggactcaggggcagcagctcagagggaggcagggtcatcaaagagacaatcaactttgtgttttgattgcaaaagaccctgcacctggggtgggagaagccccacatgaatgtgcatgtggcccgttcctactcctctttggtccagtttttcagtctgtacagtggagcgaggaggatccatgagatgacttccagtgggtttctagctctgactggctactgacccaagagatcctgtcaccattttaatgttttgccaagagatcagaatcatgttgtgtcttggggaaggaggaatcacctcctagtcaacgcagagaaattctgtgactatactctattaaaaatcctagttgccaatgtgttggctgagcctagatccctactgtgggccattcacattcacttttattttttgaaatggagtctggctctgttgcccaggctggagtgcagtggtgcaatcatggctcactgcaccctggaactcctggacttaagtgatcctcccacttcagcctccgaagtagctcggactacagggatgcaccaccatgcctcactacattttaaatttttttgtagagaagtggtctcattatgttggctaggctggtctcaaatttctgggcacaagtgattctcccacctcagcctcccaaagtgctgggattacaggtgtgagccacagtgcccggcctgtattatttttagaaatgcagatttttgctctattgctgataggctctcatggcagcaacatggcagatgacagccagactgctagacaccaaggctaggaactccagcccttcacatttggccttctgccccaccctcaagtcatatcacacttggctcttggcattggaggggcaagccctggcatcactgtggatctcaaatagaggtatgtttcccaaactctgtgccatggaacactggcttccagtgacccaggagctccctgagagcagggaccatggccacctcactcagcagagatgcctaaggcctgacacatacagtaggtcctgtccttccctgaagcctccccacatcataggtgctggagaagcatttgctgaatgaatgaacatggagtgactctgactggtgctgcatgatgaaacactcctgtgtcagaaacacttgggaaatgcccagttaggcaaacgcgacgccttaagaagtcttgtgttaacacggattgtgaacctctcagagaaggatacgattttcggggtcccctaaactgaccccccatctcctctacttctaagcaggtggcccacagaacacactcagagagtccctgtaatgcatcctctcgtttcccccaaaacacacgcccagcactgtgtctctgctgagtagcaaccccactgccttgggagaaaaccaaagcttctcagctcggcatccaaggcctctgtgctggagcttgctcacttctaacctcctattgtcccgaggtgcagcccactggcccaccccagcaccactgtgtcttgttgcctgggatcctgtgggaacatccctcaggatcccaggtccactcctccaggtccactcatggtctattcctccatgaagcctcccttgattgctccaaagttagctgcctctcctctgctttcatggcctgtctccatctcccccagcctgggctccacatggttcatatgggcaggacacggagctggggctcaggaaatcttggttgactgagaagtcaggcaaagcctattttctgggccgcacctgcagccatatatctgtgggctcctttctgagacctccacgtagggagggcctgggctggcaccgagcttactcacctctcctggtctggctctcccggatgaggaaggcccctccagggttcccaggtaacaacagcagttcctctgctttctccctgctcaggccctcatacagccacctggcggagcgaaagagagggacaagggacagggtcagcctggaggaagagggaagccaagattttaccaccaccgctgagtgaccctcacaaggccctccctctctgggcctcagagttctatctgctccacgaagagctgggctcagggtctccgaggtccatgccatttttgtcctcccagtcctggctccagggccctgggaggacaaactcatggggacagcctcagctttctctgcctggagacctcattcccccaagtaacctgggttggtcccagcctctctgctatccctgctcagtccccaaagcaccctgattctatccactcacctttctaagcctcagctttccaagagctgcccctctgtttttttctttttttactgagacaggctcctgctctgtggcctagactagagtgcagtggcgcaatcacggctcactgcagccttgaccttccaggctcagatgatcctcccacctcagcctccctagtagctgggactacaggtgcgcaccactgtgccagcccctcacgccacatgctgccatctcctacgtggacttttcagcattttccaccacgagatcctggcaacctccaaagcccagagctccacacctcctctgtgggccttcccaagcccttcctctggctcccacatctcacaggccaacctgtgctaggatgagctgtctgcccctcttgagggcaggacctgggttcgattctcccccatccccagctttgctcagcgcagagccgtgcacaaaggggagttcttgtgggaggagaaagcaggaagctctgcaaggcgggcctggggtgggaactcacccatgggagactttggccacgtggacgctggggatgttatactctctgcctgagacttcagacagcaccgtccaccagtctccatccctggagagagaaaggagtgggggcacctctttcagatgagccaaggccccgacaaccacacattcagggcttgcaaggaccctctcaggctggatcctgtggccacctgtcctgcctgtttcccaggcttccctgcactagcctgtccaggtacctcctgagtcagggctggggctggtggtagatgcacaattccaggctccctgctacagggcgctgcccacccactgcttctccctgtgggggtgtccagccgcctgaaattccaccacagggtttctgtgagcgcttcagcaaaggcttgtgcttttctacctgggggaagggccccttctcccgggacagtatctctaattccttccttcttttatttttttgagacagagttttgctcgtcgcccaggctggagtgcaatggcgtgatctcagctcactgcaacctcctcctcccaggttcaagtgattctcctgcctcagcctcccaagtagctgggattacaggcgtctgccaccaagcccggctaatttttgtatttttagtagagacggtttcaccgtgttggccaggctggtctcgaattcctgacctcaggtgatctgcccacctcagcctcccaaagtgctgggattacaggtgtgagctaccacgcctggcccattcatttattttagagatgacagggtcttgctgtcacccaagctggagtgcactggcttgatcatagctcattgcagccttgagctcccgagctccagcgattctcccacctaagcctcccagacagctagcgctacaggcacacaccaccatgcctggctctattagtgcatattcaggtatccagtgcccatggacttactcagagacgatggtcaatggctccccgagtctcagcgacagctcggccgggccacctgccgggaaactgcccagggccacggctgtggccttgcttctctctagatggagggacagaaatagtcacctacttagctagccctgctccacgcatgaggtctagtggagtctggcctgggtctggctcccagcatcagccctccacaagcaccctgagggagtcccatccacttcctaagagggccaccctggaatcaagcttttccagcagaactttgcagagccctgacagtgcccagagagagagagagagagagagaaagaaagaaaaaaaaaatagtgatagggtcttgctccatcaccactgcacgtaggctgagcgacagggcaagatcctatctctaaaaattaggctcaatgcagccttgacctcccgggctcaaatcctccagcctcagcctcctgagtggctgggactacaggtgtgcaccactacacccggctaatttaaaacaattttttagtagagatgaggtcttgctatgttgcccaggacacggtggccatgaggctcagaatgtggtgaccataaggcccaatttcaaggctgggcatcaggcggcaagggcaccctcagcacagcacccacgccctcagccaccccagagggcagcctgctcaggccaaccagactccctatgaccgccgagccttgtagcctgaaaatccaggtttcagcagctgctgaaggccactcactgcaccctagcatccctcccttcttcccccttgtcctttttctgtaaggattccttagcacataaacacattaagtaggagaagcagccagggtcagcaagaagggtccctctgcatcctagatgcccctgtaggaagcaaggtcttagaggactctggtgtgcccttcagatggagctgggaccccaggaagtggggcaggggaagcagacgagcagacaaggatgggggtgttgggtggcggcaccgtgtgggctgaagggcctgtgctccgggtgggcatgggaagaccgaggctgattctggaaatggactagttccccacatcctcccagacacgtgtggagaccctgcagtgaacccagcctggagagctccccaggggtctgtcctctgaggtctctgaggcataaggcctggccattccacagtgcagagaaatgtctgatgcttggacaaatgatgcacaccttgtgatgggtgctctctgatgagaatgggaaaatgtggcctgggagggccccttcccctcctggaagccctggccttgcactcccgggggcagccacccagctgcatacactacactgtccccctgaatggcctcactctgcctggctggcttaccttcatccttcatttcccaactgaaatgtcccttctttcaggaagccttccctgaccaaccacctctgcacacactcttggtcagaatcccttaaaacatactgccaccaaaatccaagttctagttggttacgggtttagcacctgtccctggggctcaactgtccctgaagtcatggactgtgccagtcttgtccactcctgtgtccccaggtcctgtcacaaggcctggcatgtggtagatttaaagtggttgcaagaggccgggcgcggtggctcacgcctgtaatcccagcactttgggaggccgaggcgggtggatcatgaggtcaggagatcgagaccatcctggctaacaaggtgaaaccccgtctctactaaaaatacaaaaaaaaaattagccgggcgcggtggcgggcgcctgtagtcccagctactcgggaggctgaggcaggagaatggcgtgaacccgggaagcggagcttgcagtgagccgagattgcgccactgcagtccgcagtccagcctgggcgacagagcaagactccgtctcaaaaaaaaaaaaaaaaaaaaatacaaaattagccctatgtggtggtgcacgcctgtagtcccagctactcaggaggctgaagcaggagaatcacttgaacctgggaggcggaggttgcggtgagcggagatcacatcattgcactccagcctgggcaacaagagctaaactccatctcaaaaagaaaaaaaaaaaaatatatatatatatatatatatatatatatggttgcaagactgagtggccgcagtggctcacgcctgtaatcccaacactttggaaggccaaggcaggcagatcgcctgaggtcgggagttccagaccagcctggccaacatggtgaaaccccgtctctactaaaaatacaaaaattagctgggcttggtggtggcacgtccctgtaatcccagctacttaggaggctgagacaggagaatcgcttgaacccaggaggtggagcttgcagtgagccaagatggcgccattgcactccagcatgggcaacacagcaagattccgtcccccaccccccccaaaaaaagaaaatgtgctttaatctgttttactgtagtggtgacagattaataccttgtttgacagaattcactcacaattctcaataattcttctttggggtaagtaaatctgctctgaattgtcttggctcatcagtgtttgcttgtcagcattttctgtaattgaaatagaagtgaggtgacccttgttctattagtcaagatctacctctaaggtgcgcgtgtgtgtattttttttttttttttttttttttttggagacggagtctcgctctgtcgcccaggctggagtgcagtggtgcgatcttggctcactgcaacctctgcctttcagattcaagtgattctcctgcctcagcctcctgagtagctgggattacaggcacccaccaccatgcctggctactttttgtagtagagatgagatttcaccacgttggtcaggctggtctcgaactcctgacctcgtgatctgcccgcctcggcctcccagagtgctgggattacaggcgtgagccactgcacccagcctacctctaaggtttcaatccttttgagcccagtactcttgtttgaaatgtccagttgtaaactttgctacatatttgcaggcacattgatgttatttcttcaacataggctcatattctgtgaagtttgcttttttttttttttttttttttgagacagtcctgctctgttgcccaggctggagtgcagtggcatgatcttggctcactgcaatcttgacctcctgggttcaagcgattctcctccctcagcctcctgagtagctgggattacaggcacataccactatgcctggctaatttttttgtacttttaggagagacagggtttctccatgttgtccaggttgatctcgaactcttgacctcaggtctgcctgcctcggcctctttttttttttttttttttttttgagacagagtctcacactgtcgcccgggctggactgcaatggcatgatcttggctcactgcaacctccacctcctcctgggttcaagtgattctcctgcctcagcctcccgagtaggtgggattacaggcacccaccaccacgcccagctaattttttgtatttttagtagagacggggtttcactatgttggtcaggttggtcttgaactcctgacctcatgatccgccctcctcagcctcttaaagcgctgggattacaggcatgcgcctggcctgaagtttgctttttttttagtcagctctgtaaaacagtgtgctaagattttcacatctttaattatcacatggttgaggagacttctacgttacaaatgaaaaacttgagatggggaatttaggcaatttattgtttttgttttgttttgttttgttttgtttgagacagagtcttgctctgtcccccaggctggagtgcagtggctcgatcttggctcactgcaacctccacctcccaggttcaagcagttctcctgtctcagcctccagagtagctgggactacaggtgcatgccaccacgcccggctagtttttgtatttttagtagagacagggttttaccatattggtcaggctgatctcaaactcctgacctcaggtgatccacctgcctcagccttccaaagtgctggggttacaggcatgagccaccgcccctagccaatttaggtgatttaaccaaagtcccagtagcaaaacttgcacaacagccatataaggcacatgtccctaggctctgtccaggggaacaagtaaatacaccatgaagtagtgtgatcttgttatctgtgctggttaattttatgtgtcattgtggctaggccacacaacccagatatttggtcaaataccagtctagatgttgctgtgattgagattgaatttatttatttttttgagacggagttttgctcttgttgcccaggctggagtgcagtggtgtgatctcggctcactgcaacctctacctcccaggttcaagtgattctcctgcctcagcctcccaagtagctgagattacaggcgtgcgccaccatgctcggctaattttgtatctttagtagagatggggtttcaccatgttggtcaggctggtctcaaactcccaccctcaggtgatctgcccgcctcggcctcccaaagtgctaggattacaggcgtgagccactgcggtcagctgagattgaatttaaatcagtagaacgagtaatgcagataaccgtccataatgtgggtgggcctcgtgcaatcagttgaaggtcttaaaagaacaagactgacgtcctttgaggaagagggaattctgcctccagactgtggtcaactcaggactgcagcatcagcttttccctgggtctccagtctgccctgcagatttcagacttacagcctccacaactgtgtgagccagctcctcaaaaaaaatctctacacacacacacacacacacacacacacaactattggttgtgtttctctggagaaccctaatatattatcgaaatccctatcaaggtgtgacttgagaaaggatttgtggtctgttttgggagaagaagaaacagacctggggccatagttccaacatcaaaatactagaattgcggccgggtgcagtggctcacgcctgtaatcccagcactttgggaggccgaggtgggtggatcacgaggtcaggagattgagaccatcctggctaacacagtgaaaccctgtctctactaaaaatacaaaaaaaaaaaaaattagccaggcgtggtggcgggcacctgtagtcccagctactcgggaggctgaggcaggagaatggcgtgaacgcagcaggcggagcttgcagtcagccaagactgtcccactgcactccagccttggagacagagtgagactccgtctcaaaaaaaaaaagaacaaaaaaactagaattgctaggatatttttattgttcaactgtccaagaaactgggagttttagtcaagactatattagaaaatcatggttatagactcagcatatgcattgtatatgctatttttccaccattaagacagccctggcaagggccaggcatggtggctcatgcctgaaatctcagcactttgggaggccaaggcgggaggatcatttgaccccaagagttcaagaccagcctgggcaacatagggagactccatctctacaaaaattttaaaatttagccaggcatggtggcatgtgcctgtagtcccaactactcgggaggctgaggtaggaggattgcttgagcctgggaggttgaagctgcagtaagcttcactgcactccagcctgggagacagagcaaaaccatgtattaaaaaatatatatataccacaaaaataaaaagacagccctaatttcacttcaggtaatttcatagtacctctcgggtccactaggacagtatagcagaactttctgcaacaatggaaatgttctataattgtgtgctgtctaacaaggtggtcacttactacgtgtgctattgagcacttaaaatgtggctggggtgatgaaagacctttttttttttttttttttgttagacgaattttcactctgttgcccaggctggagtgcagtggcatagtggcatgatctcggctcactgcaacctctgcctcccgggttcaagtgattctcttgcctcagcctcctaagtagctgggattacaggcacccaccaccatgaccggctaatttttgtatttttagtagagacggggtttcaccatgttggccaggctggtcttgaactcctgacctcaggttatctgcccgccttggcctcccaaagtgctgggattacaggcgtgagccaccgtgccccaccctggcctaaaatgttaaatttaagcagttacgtgtggctggtggcgactgcaatggacagtgcagctctgggggctggggaggtggggctggccagctcggtgtttggataaacaactggttgagaaggagggaagccttgggaaatgcctgggggactgtcatgccctcctggtttaatattctggttagtgcctgttgctttctcctgttttctcatttatgccattgtttactgttcttactgctaaggtaggctgtataggagcagggaccctgctgtatggctcagtaggcagggcctggtatgcagcaggccctcagcggtgcttacactgtgttggagctgctggccaggaaggcccacagaggcagtgaagtctagtactgtgtgggaagagcctggctgtcacaggccctgaggcctacctgcttccatggtcacaggtccctggccttggacagaggaactcaagcttgggcttggcagagattttcttctgctgggcagacttcccattgttcctcagcagagcactcagaagcacatcatcgagggaaatctgaaagagacacagtgatggggacagagccgaggcttctggcccaatctcagatacctctccctccccagatcggccctggctacctcctcacagagcatgtgaatgacctccctcctgtgggaccaggctccagcctctctgccagcctctgaaggcttcctgcacattggacgctgttttctccacatctcatcttttttatgccacaacaggctcaactttttctttctgggcctctgcttgggtccctccgatgggcagtcatgccctctcctctccttcagtcctgtttggatcccattcttccttccccaggaagcctcccagcccctagcctttgttgatcactcctttgaattcctatggctcacttagaaccctttctctgacccgggatcacacttggctactgggtggcaggggacaatgacaggacagtgagcttcctccaggcataccaggaactgtggcttggatcagaggtctgcaaggagggctgggtgtggtggctcatgcctgtaatcccagcactttgggaggctgaggcaggtggatgacctgaggtcaggagttcaagaccaagaccagcctgatcaatatggtgaaacctcatctccactaaaaatacaaagattagctgggcgtggtggtgtgtacctgtagtcccagctactcaggtgggaggctgagacaggagaattgcttgaacctgggaggcagaggttgcaatgagccaagatcaagtcactgcactccagcctgggtgacagagggagactccctctcaaaaaaaaaaaaaaaaaaaaaaaaaaaaaaggaccgtgggttgtatgatgcagtgatgacttgcaaggctttaggggactgactgttgagccacttcccctctctgtgcctccttttcctcatctgaaaaatggggataacaacactcaacatacaggtccgagagataacgcacatgaaaaccctgaccagccccctgtttcctttaccacgtcctgaatgtcagttcatcagcggcctctcctgggagcctccccaggaggtgtcactccgtcacccaggctagagtgtagtggtgtagtcctagctcattgcacccttgaactcctgggttcaggggatcctcccacctcagcctcccaagtagctgggattacagacattagccaccacatccagcctctttgcaaattttgttttgttttgtttttttaatacagagagtttcactcttgttgcccaggctggagtgcaatagcacgatctcagttcactgcaacttccgcctcctgggttcaagcgattctcctgcctcagcctcccgagtagctgggattacaggcatgcaccaccacgcctggccgattttgtatttttagtagagatggggtctccccatattggtcaggctggtcttgaactcccgacctcaggcgatccgccctcctcggtctgccaaagtgctgggattacaggcatgagccaccgcacccggtccttttttcttaagttacgggctcatgccatgttgcccaggctgttcttgaactcctgggctccaccaatcctcccacctcagcttcccaaaatcctgggattacaggtgtgagccatgggacccagcctcccttgggaagttttcatcattcatttgagagtttacttgtttaatctgccactatcctgtaactgcatgaggacaaagacttcttttgtttgcctattactcagcatttagtgaggcatcacagaaagcactcagcacacattaactaaatgagactgttagctcttcagacaggtaggtgtcttatcgttagaatagtttaaatccccggatttccagggtagtgctgatttttccaaacactattttaaagtgtttggggagtgggaggcggagctttgtctttcttttcagatggtttcattcttttcagtagggacaaggcacagttacacaattggcccagttcagctgatattcatggagcttctgctctgtgtcaggcacctgccaaggactggtggtccctggaggggaacccatgcaccttactctggaggagatcactgaatggggtggtgacagagtgggctcattccttgcctttgaaccccacactgcctggatgaggacgggcgtccatcaatatcatggagtgatttctgtggcgtcctggaccagtcctgtctggggagtaaagatcctaccttagagcatggaacagccctctctgttcttcagtctcatgttgttgacatgggaataacaatacctgggccgggcgcggtggctcatgcctgtaatcccagcactttgggaggccgaggtgggcagatcacatgaggtcaggagtttgagaccagcctggccaacatggtgaaaccctgtctttactaaaaatacaaaaatgagccgggtgtggtggtgggtacctgtaatcccagctactcgggagaccgaggcaaaagaatcacttgaacctgggaggcaggggctgcagtgagccgagattgtgccactgcactgcagcctgggcgacagagcgagactctgtacccccctcccgccccaaaaaacctaatacctgcttgctgctccctccgtatggggagttcggcattcatctggaagggagctcttgaacacagaatgggcatatggcatggaaatgggtcctgacagccacttcctgctcagccttttaggatcctgcagcctgggtacactgaaatggtgctgctgttcttgaggaggttttttgtttttgttttacattattggggtcttgctgtgttgcccaggctggtcttgaactcctgggcttaagcgatcctcctggggaggatttttacaaacccaagaccaggaaaccccagggagagaacctctggcttgggtagcatgagtgcccacttgaacctggctggagctgtgtggcctcaggcaaagcatgcaagcttcccccgtctcatctgtgaacaaggtgcactacaggcgccacggggctgtggggagagttgcaggagtctggcacagagtgggtgctcagtaaggcttagtttcctttcccctccttcaggaagaccacagttaccacctgcaataaactgagagactccttcctgccgcaggtggagctgggggctgggcccaaaggcagatggagacaggggagctgtactcaggctgaaagcctccccaaagtctctgcagctcccttcacctggtcaaggacttggtcaggtcaaggccaataagcccctgggggcaaaataaagaccatacaatgggccagcctaggaggaggcagagtattagccgcacattttgtaagacagcatcaaatcattaactctacaaatttttgaaaaacttactatgtgccaggcactttccggaggacatgaggcatcgggtgaaaggaaaaagttagtcaacggcagccgagatgagcacgctgcccagaatattgtgttttttttttttttttttttttcagtatctcacttgggtcccatttcagatacagtgaccaagtccctgagaggacaaccatgtgattctgttcatgtagcccattcgtgcaggactgggcctgccatcatgtgtattttgtgcttctgaagatcatttttcagcagtgggggtaagagtgatgaatttggccaggcacagtggctcatgcctgtaatcccagcaatttaggaggctgagacaggaggattgcttgaggccaggagttcgagaccagcctgggcaacatagtgagaacccccacccccacccccaccaccgcctgccatctctacaaaaatataacgaattagctgggcatggtggtacatgcctgtagtctcagctacttgggaggctaaggcaggaggatcacttgagcccagtggttcaagtctatagttagtcataattacgccgctgcactccagcctgggtaacagaatgagaccccaactcaaaaaaaaaaatgaatttggattgagttaaagggagacctctccctctcttccaattgagaaatatcacccctttgagagtgagagtgcactgtaggctctacagctgaaatgtcttgagagatggtagccctcacgttcctgactttggagtctgactgcagcgcagagaggggcccaaagtcacacagcaagtgcgcacctgagatgggactaggacgggcgtgaagacaagctgcacggaagagcgtaagctccaagaggaggtcaaaggtggagcaggtgagtcttggttcttctgggacccccagaaaccacccctctttacagcctcagtagaaccactcccccttctccttgagcttgtttttttcccaacagcaaataaagcccagtcccagtcggggcaggggagaccattcttcctcacctgtctccaggccatccaagaacaaaagcaagcatacttactggtttgtcatcaaaggcttgggaagacagctctgctgagacgcatgctctggctggacaggttagggctttgggggcccttctggaagtctgccagtgtccttggtcctaggacacccagaactctctcagcctgggaggatcttcagggagaggctaggtgttggtttgggtagctcagcatctgtctgcagtcagcagtttgtacaccagggatggatcagctgccccatgctccttagggattctggactggggaaccctcccaagcacagccgagccagggagggaaggcccagggccctttgagctctgtcacagagacacaggcgtggggtccttggagctctagctccgactgcagactctgtggttctcacaaccacccgtttcctctgacggcatcacagaccgtcgaggagccaccttccccaagttcctgtttctaggggagcagctgctgccttgtcatgatcgtggagcaaaaggtttttctctggctttgtggcttagtcttgtccaaggaacacaggactgaggaaaatgagccggagttcccatgctggcctgaccataataatcactcagcgggacttaattgtagcaatttctgggatctcccaaactttctaaatccaagtctccagatagggagcccaggaatctaaattttaaaccctgcaggagattcccttgactgacgagtgtgggaagcactgccttctcagcctttaatgtgtataggaatcacctggggatcttgttgcactgcaggctctgattcagaaggtctggggcagagttcagtattttgcatttctaatacgctcccaggtgacccccatgttgccagtctggggaccacactttgaatagcagcagtatctggacagtggtctccaagtatggtccctagaccagcagcctcagcgggaatttgttagacatgcaaattctcaggccgcatcccagatctatggaatcatactctggaggtaggcccagcaatctgttttcatgcctccaggtgattccgatgcatgcccaggcttgatttttttttttttttttttttttttttttttacagggtcttgctttgtcacccaggatagagtgcagtggcacaatcatagcttagtgcagccttgacccaggctcaagtaatcctcccttctcagccttgagtagctaggactacaggtgtgcaccagcactcctggctaattttaaattttttttgtacagatgaggtttcactgtgctgctccatctaatctcaaactcctggcctcaattgttcctcccacttccacctccctaagtgttgggattacaagcatgagccacagtccatgcccaagcttgagaatcactggtctaggataaagaatctgactctggctgaattgtctttgatcagtgtgttaccttcagtcccactcttcattaagatttaaccacaccctctcgctgcttccccattagggggattagtactcttggagacaaagggcccactgcactgaaatgattcctgactccagctcagcccatgcagccctttctggggccttgccagctacagcactcctgctcaggttctcctttgatcctagggaaggctggtttgatttttatccttgtaggcacttggcacacagagctgaaggagccagagtggaggcacacttctgcaagagagttctaatcaggacgttagaatgggtgacagccactcagggatgtgggccttggcagggagggacttgagcttgagcccaccttcccactcctgctgccatacaactgtaatgcccgtcttcttatgatacgcacatcttcaaaacaagcctcaaggtgcagttcatgaatggggcaggaagtagggaatctctggtctcttcttaaaagaatcccacggcataactctccttttctacttagggaggcacctaagaattacaaaatttaaaatcctaggtctatccactaagaaatatgcactggtgttcctccctggctcctggccagagctgctaaaacccttctaatttcctcggtgacagaagtgttttctgttctaatgaggcaacacttggtgggctcctggatggggactggtcactagaaagacaaagccatcattatgagcttggggctttcagtcccacctcatcctctggagtggggagaggagctcgagattgagttaataattgataatgcttatgtgatgaagcttccataaaaatccctaaagtacgaggttcagagagtttccaggttggtgaacacatccaacacaccagaagggtggcacaccccaactccctgggacccctccagaccttgctctatgtattattattattatttttagacagattcttgctctgttgtccagactggagtggagtggcacaatttaggctcaccgcatcctctgcctcccgggttcaagcaatcctcttgccccagcctcctgagtagctgggattacaggtgtgcaccaccacgcccagctaatttttgtatttttagtagagacggggtttcatcatgttagccaggctggtctcgaactcctgacctcaggtgatccacccgccttggcttcccaaagtgctgggattacaggcttgagccactgtgtccagcctcctacatacttctttatctggccatttacctgtatcctttatcgtatcctttttttttttttttgagacagagtcttgctctgtcacccaggctggagtgcagtggcgcaatctcggctcactgcaagctccgcctcccgggttcataccattctcctgtctcagcctcctgagtagctgggactacaggcacccaccaccacacccagctaactttttgtatttttagtagagacggggtttcaccgtgttagccaggatggtctcaatctcctgacctcgtgatccacccacctcggcctcccaaagttctgggattacaggcgtgagccaccgtgcccagcctatcgtatcctttttattttatttttttctgtttctagaatacagacagggtctcactatattgcccaggctggtcttgaactcctgggctcaagcagtcctcctgcctcccaaactgctgggattacaggtgtgagccactgcacccagcctcatatccttttgaataataaaccggtaaattcagtgtttccctgagttccgtgagccatcttagcgaactatcaaacctgagggagggggtctagtttgtagccaggttggacagaagtatgaataacctggggatccactgcttgcacctggcatctaaagcagggggcggtcttgtgggcctgaacccttaacctgtagggtctgtactaactccaggaagctggtgtggtaatttaggacacctactcagtgtctggggtgttggagaactggttggtatatgggaaaaaagctcacacatttggtcacagcagtgttggaagtgttgagtgtagtggaggaaactgtttcccatatagccacttactagttttgtgaccatttacaagctagttatctctggacctgtttctgcatctataaaatgggaatagcatgtatctcactggatcaatagaaggaaatttataggaaggcattaagggcctggcctatatatagatgctcaataaagggctgattcccacacctgtaaccctagcattttgggaggctgaggcaagatcacttgaggtcaggagttcaagtctagcctaggcaacaacgtgatatgctgtctctacaaaaaataaaaaattagccaggcatggtggtgcatgcctgtagtccctgctcctcaagaggctgaagtgggaggatggcttgagcccagaagtttgaggctgcagtgagctatgattacaccactgccatccagcttgggtgacaaagtgagacactgtttcaaaaaaaaaaaaaaaaaaaaaaaaaaaaagggcccagcgcaggggctcatgcctgtaattccagcactttgggaggctgaggcgggcagatcacttgaagtcaggagttccagaccagcctggtcaacatggcgaaaccccatctctactaaaaattagctgggcgtggtggcacatgcttgtagtcccagctactcagaaggctgagacaggagaattgcttgaacctaggaggaggaggttgcagtgagtggatatcatgccactgcactccagcctgggcgacagagcgagactccatctcagaacaaaacataaccaaacaaaaaacaaaaaaaaaggcaactgaggccatcagatcagttccttcccatgtcagcattctgtggagcattggcctgcattgtaaggcttcagcctggtaatctttatctgttcatatgcatttgtttcaactcctctgccagaatgggcatgtcttttttttttttttttttgagacaagagtctttctctgtcgcacaggctggagtgcagtagcgctatctccgctctctgctagctccgcctcccgggttcacgccattctcctgcctcagcctcctgagtagctaggactacaggtgcccaccaccacgcccgacgaattttttgtatttttagtagagatggggtttcactgtgttagccaggatggtctcgatctcccgacctcgtgatctgcccacctcagcctcccaaagtgctgggattactggcgtgagccaccgcgcccggtggttcatgtcattttttacgagtgcctgtcacagatgtagcaatccacatgcacttttgctggcacttgccccgggttactgaaaactcatctgagatggtggtcttctgaaattattctttttttttttttttttttttttttctggagacggagttttactcttgttacccaggctggaatgcaatggtgcaatcttggctcactgcaatctccacctcctgggttcaagcgattctcctgtctcagcctcccgagtagcgggattacaggtgcatgccaccacgctcgactaatttttttttttttttttgtatttttagtagagacagggttttatcacattggtcaggctggtctcgaactcctgacctccagtgatccgcccgccttggcctcccaaagtgctgggattacaggcgtgagccaccatgcctggcttttttttttttttttttttttgagacagtctcgctctgtagcccaggctagagtgcagtggtgtgatcttggctcactgcaaactccacctcccgggttcaagtgattctcctgcctcagccttccaagtagctgggattacaggcacataccaccatgcctggctaatttttgtatttttagtagaaacagggtttcaccatgttggccaggctggtctttaactcctgacctcaggtgatccgcccaccttggcctcccagagtgttgggattacaggcgtgagccactgcactcggtctgaaattattcttgatgggtacaaatatagccatttctggagaaacacaagctggtctcttagaagacaagtggttgcagattattaaaatgagaggtggaacccagcaatcccacacaggtggtggagctgtgacgtggaccaccttctcaagacctcagcttctcctcctccatcacaaacaacactgtcaggcttctcacgatttttggcttgagggaaatacagacacatcagatagaattctgcataattccctgggatttgatcctggctggacttattggctgcatgaccttgggcaaatgatttatcatcagtcttcatttcctcctataaatggacagtgtcgcttggtggataagcaatcacatgtgaaaatggcaacacagaaccagcatacagcaactcggtcctgccctgaaccccagtgaatggcttgaaagaaataacaccagcaatcaggtaacaatgagacatatgcagctttatttaataatctgtaaaaagtcatactctggcagagtgatgcattccttatctcagcagaaagcaaacagtctgtctgaaaagccccttcccaagatttggaactgtgtaaccctgagcttacatctcaatgctcccaagagctgggctcttgctatgtggtagttggtctccacaattctctcaccctccagcaatactctctgtctggctgtgactccctcacctaacagtagacatgaggctgaaaacaactttacctggacagggctacccctacagattggccctttctctcctacaaaagggagttcataggattaacaatctttctaatggctgggagcaatgactcatgcctgtaatcccagcactttgggaggctgaggcaggtggatcacctgaggtcaggagtttgagaccagcctggccaacatggtgaaactccatctctactaaaaatacataacttagctgggtatggtggcaggtgcctgtagtctcagctactcgggaggctgaggcaggagaatcgcttgaacccagggggcagaggttgcagtgagccaagtttgcgccattgcactccagcctgggtaacagcgagactctgtctcaaaaaaaaaaaaagactctgagaaatgggttctgtatcaatttaatttggcttccattacatctactgaaatcaaggctatacttgttaaacatgatactgtgttaatggctgttcctctccccccacccatttctcccccatctacatgctttttaggccaaacctctcccctttctgggaactgaggaatggagacacactctctgtcacagacctaagaggcacttcttgtggatatgtggatgtctggtatcagatactgcagcgacagcagttttgctcttcagagcagaggcctggcattttgtttccaccttcctgtgctaagagagtccagtaattaaaccacattcactccttggaaaaaactctatgttgtatcagaacctcagcgatggttcatgggcttccagcagaatatattcctcccttttatttatagaagagtatacagaaattcatttggacagaaggagcctctctatgtaacaggcacccttctgctactggtcacaatcaatcaatggtccagacggcaattatgattttccacattcctcaaagctgctctctcctgaaatcactttgcaaattttgttgaccaatttgcaaacaaaagagaatgcagtggcctacccaacctagaaatctgttctgcctaattcccttaaaaacaccattgagaatgcaaaataagtcccttttttgttttttgcagaagcactacaagaaagcgtgtctaaaaccacagaactatgcacacacaaacacagacacgcgtgctcgcacacacagagtcgggatcaaagaatcttatctgatacatagttgggggagcacgggaaaaagctggcaagagaggatatggagagatctgatcagctaaagatgttggaatgttacagtatggcatggaagtggttcttgggctatacaaaaaagggggtgggcaggcagagagaatgataaatccaggctactagagagaggttcagtggccatgcatgagttaaagatagtagaggccagtttactggatgaaatgttatattatggagtggtcatttgaaggatggacttgcaatggtccaggggaggagcatctgcttagcaggacacctccatggtctggtgtctgtccaggacatcaggggactcacaggattcttgagttccatctgactgattgctggtgacagaccggctgaagggactttctccagagccgaggctactcgaggttgagtgggttcgtgatcgggcgagccgagtcatgctggcagatggtactgtaacagagaaccaaggggactagaagatgaagccccggttaagcccagctaacctaggagtctcatcaaagtctttatgtttagcttttccgactcatttaccatgacacccaggacaagatatagccatccccattttgtatcatttgctctaggtgagtggcgatatgtgaggccactttaatcctttagatctggttggaatctcagctgattgtagtcaccgcagaacaaggggaaaccctaaatccagagtatagcctcttaactatgcccacaccattcagacagtgacagaatggaggctttgggaacccaaacaggtaaccaaaacctacagtgcatgcaagactaaaccaaaagaaaagaaagacacacacacaagtatgaaggtgtttcacaaacacagtgcaagcccgatacaacgagactaccatccgtgtccacaggctaccttgctaccagggaggagatttgtaggatggtgcaggtgaaggggagggcagattggcttggagctgacctcaacacagggatgaggtacaggttgccagggacagagaagcaggtgtttaactcagactcctgttctgccactgcttgactctaaggtccttccagcttggctgggactgggccttacctggcatagcctccctgcctatcgtcctgggcagcagccactcccctagctgtcatttcaatgctggggtcaaaaggtgctatcatctgcagagttctctgggcacaggctctgaccctcctatttagagccaaggctgcccttggattcctgtgtctggaggttaattcaaggatcagtaggtggtggtggaagatgggccctgcctatcaagtttcagctgctgctgtgaccctggatttaggatgacaagaggaggcctgccccttacaaccagatcctttcctcctcctgggggaccagggctggacctgtaggctaaatctcttggggcgtactgagccacgttctatcgggctctcactgcataggaagaccgcggacatgctgcaggcagccagtgcagccaggagagactggaaggcggggcagggccagcacagaggaaggtacctgactcggtgctcaggtgactgagctgcacatacgggactggaagcaggatggacacaggaaaaggcaggttagtgaccccagagtgccaagtggcaacctcagctgcctggtagacactgacagaatactctaagccagggataaaattttattttaaggtcccagagaggaggtgaggctgacagatacttcaataacatctcaaatgttactttcctcaactagacaaaggcaattgttttcccctctgctataaacagtcatcttgctttggatcagaagtgggctggaagatcagctatttcataggaaaaggataagaatggactaggagagggcctcctgctcctcccagtgagccacagggctgtgggtgtgggctcggttggtagcggctcacaggcaaggatgacacagccacttgagacaagacatacatggtctgcctggcaggtacagggctgcacccagggcccagctgcccagagcagctgaccagacagctcgccaatgaccattatccacactaataccaaagacaggagaaaaatcaccctactgggtaaagagctctgtacctgggtgaaagagtttttctaaaaactccaagaaaggagcaagtgtagataattctgtgaccatgaaaaagctcagaggtcttacaatacaagagaccaggacaatggcatatgatatggacacacccttggacttgctctaaaacactctccaagttcgtcccctggggtggaggagactttaccaaggatactgcccttttctcctggagtctccatttcatttctctaggtcaggagttattaaccagctgagtttaaatgcaaatcataatttcagattcacacctaggacagcctaagctgcaggggttcaaaatgtgggctctggagtcagactgtcagggtttgaatcatggccctgcagctgaatttttacccttggcaatgtgcttagtctctttgagcctcagtttcttcttctataaattggcactaataacagaatgacttcttagattaagaatatataggttgggcacggtagctcacgcatgtaatcccagcactttgggaggccaaggcaggcagatcatgaggtcaagagatcaagaccatcctggccaacatggtgaatctccgtctctcctaaaaatacaaaaattattcgggtgtggtggcacatgcctgtagtcccagctacttgggaggctgaggcaggagaatcgcttgaacccaggaggcggaggttgcagtgagctgagatcacaccactgcactccagcctggcaacagagtgagactctgtctcaaaaaaaaaaaaaaaaaaaaaagaatatatattgcctgatgaaagtaagtgctgagtgttagcttacaaatacggacaaatgaatgttccataaacatttcagtttctactttgcttaaggctagctgccacagaggttatatctcaagaattgtgggctcccagatgtgaaactggctcccaatattcctaaatcgttgctagatagaaagttgtgtactactcactgtagcccattccctgcaaaaagtacttgaaggcctcggtgagcttcccaggctggggggataaaacaagagggcattaatttttgcatagacagagaagcagaattaaatgggtgtttaaaaaaaattctccttacctgaactacctggggcagtcccccacagtccgccatctagaaaaggaaaaatatgcaagtcagctgggacttacccttaagagaattgctctgaacaccccaagtcctttcaaacagaacaagattgaattctaggttttaatgtttaactgcaagtttgcatctcaatgcacctacgtacaaacatttataaccttggatgaaaatctgaaataattattacatacttatttatcaataagactgaagccctgactttcaggcccatggtgggaattttctgttgaggtgatagtgaagttaaccactactctcaaccatgaaaaccacctgaagaaggttcctttcagagccctcgaacagtgtgaccctaacttctctgtgcatcaagctttccaagtcccatttcaactctacattatctttcctccgtgagtaagggcactctgccatcaggagctgatactgattcagccggcttgctcagtcagccactttcctctaatagctgggtttggtaatgctgcttttcacttcataaacatttacagctggttattctcacgtgtgcaaggatttctagggtatggcttcattagtgtgccctggaattacctgaaggacttgttaaaactcagattcttggattcctatcccagagattctgatttgataggtttggggtatggttcgagattgtgcatttctggccgcgcgcagtggctcacacctgtaatcccagcaccttgggaggccgaggtcggggggatcacctgaggtcaggagttccagaccagcctggtcagcatggtgaaactccatctctactaaaaatacaaaaattagccgggcgtggtggcacacacctgtagtcccagctactctggaggctgacacagaagaatcacttgaactcatgaggcagaggttgcagtgagccaagatcatgccactgcactccaacctgggcgacagagtccgtctccaggaaaaaaaaaaaaaaaggaacgtacatttctaataagatctcaggtgatttgaatctactgtccacagaaaagcgtttttagggcatgttggccataggcctgctctctttcttccagctgttacacactctggactcagatggtattcttcaggctgactggctttttttaaaaaggaacatgaaccccatggtttcaattcactggcattaaaacttattatgaagggggactactactgaggagaatgccacagaagacgcagaagtttgagattaacaagggagaggcccctgaaaattctaagcataagattataaacaaacatttaacaaatatacaaaaaaaccaaaccagcacagactgtattttcatgaagtttaggagctgaaacctgattagaacacagaacagttcccatatgcagagagaatactgggagaaactatttccaagatgggtacctatcaaatggtttgagaatcagttcaatctgccataggagttatccactctattctatggtgttgtagatgggcatttttgcgaaaaataactatgtctatggttattgtagggtttagttttatgcttttgtatattgattcaaacctgaaatgagaaactaatttgaaactataaacttaaaaaaaaattttttttgagataaagtctcactctcgttgcccaggctggagtgcaatggtgcaatcttggctcactgcaacctccacctcccaggttcaagcgattctcctgcctcagtctctggagtagctgggattacaggtgcccagcatcatgcccggctaatttttgtatttttagtagagatgaggtttcatcatgttgggcaggctggtcttgaactcctggcctcagcttcccaaagtgctgggattacaggtgtgagccaccatgcccagcccctccccaaaatttttagaccagcccatcaattgcctggagggcagaacattttgaatgtggtcacctcagagcattaacttcacattagatttctaggaactacaggcgtttgtggtaacagcacttccctttcaaacacacttcaaagggaaaaggaagatggcagaggtctttcagactgaaaatgtagcagtaagcaacatacgatcggcattgaaatctacagtagtccaagttcccaagttcaaactagaaggtcagctacctcaacactttagtagaggctctaggaaaagctaagatgaaacaatgacaggcagaaactcttgcctcggttatactcaaaaggggagacacttgatactaactctagatatttagcataagagttggtctgtatttgccctaagagaaagaaaatgcatccaccctcatcataagaattgttactaaaagcttccttaccaatacagcaggattttgcatatacagaatttacatccattatcttctcacaatattaaatcatgttgacgaagtttttttttttttttttttagagacagggtttcactctgtcacctaggttggagtgcagcatcaggagcacaaatcctcgaattcctgggctcaaggaatcctctcgcctcagcttcctgagtagctggggctacggatgcgcaccaccaagcccagctaattttcttattgtttttgtagagacagagtctcactatgtttcccagactgctctcgaactcctggcctcccacctcggccttccaaagtgctgggattataggtgtgagccactgcacccagccaaagtttttagttacatgggaaaggctatgtcataaagttgaggaaaacagatacagggttgtaaatactctttgacagggtctcattctgtcacccaggctggtctcaaactcctggactcaagtgatccgcccaactcagcctcccaaagtgttgggattataggtgtgagccaccgtgcccagcccgtctctaattttaatgatgtaaaaatgtataggaaaaagacagcagtattttaccagaggtttgggtggtaggattacaaataatttaaatttattttattccatatgctttcctcttttttgcagtgttttacaatgagaacatattcaggaaaaaagctttattttatttatttgtttatttatttttgagatggagtcttgctctgtcgcccaggctagagtgcagtggtgcaatctcagctcactgcaacctccgcctcccaggttcaagtgattctcctgcctcagcctcccaggtagctgggactacaggcgtgggccaccatgcccagttaatttttgtatttttagtagagacggggtttcaccatattggctaggctggtctcaaattcctgacctcgtgatccaactgccttagcctcccaaagtgctgagattacaggtgtgagccaccgcacctggccaaaaggattattttaaaaagagaatgaaggctgggtgcggtggctcacacctgtaatcccagcactttgggaggccaaggtgggtggatcacgaggacaggagatcgagaccaccctggctaacacggtgaaaccccgtctctactaaaaatacgaaaaattagccgggcatggtggcacgtgcctgtagtcccagctactcaggaggctgacgcaggagaattgcttgaacccgagaggtggaggttgcagtgagctgagatggcgccactgcactccagccagggcaacacagcgggactctgtctcaaagaaaaagaagagaatgagataaccaaagagagggaagctttgctcctttctaagcaattattccagaaaatatgattaatctgaagcacatataagggttggaagtgagggaagaaggcacattacctttagcaaagttgtatttatagggttcaggcgggaattgcattcgacctaaaatttaaaaaaagagaagaaaataattttatgagttgctaggaaaaaaaacgaaatagctcggtatgagaatcatcttgcaagatcaacagctcagtctggagaaggctgagccagccaaagagattaccaaaatacatagtgggagatatatttatttatttatttatttatttatttattttttttttgagacggagtctcgctctgtcgcccaggctggagtgcagtggcgcgatctcggctcactgcaagctccgcctcccgggttcacgccattctcctgcctcagcctcccgagtagctgggactacaggcgcccgctaccacgcccggctaattttgtgtatttttagtagagacggggtttcaccgtgttagccaggatggtctcgatctcctgacctcgtgatccgcccacctcggcctcccaaagtgctgggattacaggcgtgagccaccgcgcccggcccgggagatatatttatatgatatactttgatatttctgagcagatctaaaaatttcacttatctaattttctgaatctgttacgtgtctttaaaaaactacaagctgaatctaagtcttcctactgactagctatataacatgaaagtaggttaccttacttctttgagaaatggactggaccgtgggtcctctcctgctgggatcttttaatggcttctgagtacaactggttctaatgactaagccctgggcacctcccttacctcacttttcacctctttccttagtgggtttgccattctttatatcctcactcttttctatctcaaggtctttggctatccagtccaaagttgaactcttctcatttttctctcatggagtcatttaattaagaatcacagccctgtgcattcacatgtctgatatcgtgcacccttgtgttcatgaaggcagggatctcaaagaaaatgttttggggagacaatctgttggttccatattattttagggctattttgatcaactggatttctccgtttatatgtttgctaagaacacacatacaaaacctgtgcttagaatctggatccagcagggtgaaacatgtaatacaaagcaaaatgaaaccactgcaaacacttcacaactgagctgagtgaacacagaaaggagtgggatttctacagatagataaagggaaaaggtgagtgtttgaggacttccagaatcaaggcgaaagcataagcaaagccccaggggtggaacggaatggctaccgagccaagtgtgaggtgaggtagactgaaagtgaggctggggcacaggctggagctgactgtggaaggtaggatgccacagaaggtgtctgaagtgacaggatctaagttgtttttaagagagcagtggcctacatgatagactgcaagtggcagcaagcagtggttaaaattacctaggcaagacccagtaatccagatgaacttttagtctggggattgcgggtaggcaggtatacaaaactcttctaaaatcagggataatataaaagtcaggatcaccaaatcggagttttgatttgctctatacaaaggacaatgcaggcagtgacaaacaaatgtacccgttcactacagaatgcgcattaactctaaaaggtagaatttaaaaactggatccctaactgctaggcacagtgcttagaacatagtagatagactataaatattttctggaagagtgaactctcaaatctggatttaacataataaatcatgctttccttggttcactactttgcaatttcaacaacattataagaagtcttgatacctagtagaacaaccacaatcactgttttttctttttctttttttttttttttgagatggagtcttgttctgtctcccaggctggggtgcagtggcacgatctcagctcactgaaacctccgcttcctgggttctagcaattctctcgccaagtagctgggattacaggtgcatgccatcacacccagctcgtttttgtatttttagtagagacagggtttcgccatgttggccaggctggaactcctgacctcaggtgatccaccaatctcggcctcccaaagtgctgggattacgagcgtgagccacaaccactggtttttgacatctactttctcctcagctgcctgaatcttactcattttcatattcttcatagcactgagtaaataggagatgctcaaaatatgatgttgaatgaataagtaagcaagaatagttactgcagttactgacaatgactagaatttgtagagtttcttcttgctcttccatgcgtggatattcctcttaatccccacacacttgtgggataaaatgctctggcaggggaactaggtttgactgtgtatgaaagagcatctacttgtggtatagacagggctccagaattctcataaacactgaagatgtggaaatcagaaagagggagaggccttatctatatggccaaattattacagtcttgaaaaataactgcaaaggttgctttaagtccacacaatttaaaaaaggcaaatgactagatccaagatgaacagaaatactaagcattgtaaggaaattctgattaggaatattttctaaaaatattttcctgtattaagtatatatgttcatttaaaaatgcttttgacagtttggcagcatgtatctccacctttttagccagaaaacactgacctttataaagttgcttcttgataaattggggtcaccactataacctttttacctctggggaatgttttttgaggaaggggaactgagggttattggcctctatgtgcaagtcatgccatgtatttcacaacagacacgtagtgttttacagggcagttcagggagatgcgaatgttatcctttcacatctgcatattctcaccctacaaacatttccccactccacaaaccttctcaactatgtctacacctctgattatttgctagacttcctttccaaaaagctttactccataatgttttgctctatttagggcagccaaagaaatcaagtaatttcacagagatatttagttaagttatatatgctgtaggaaacacataattagacatatgaagaactatcaacttcatttgtaatcaaataaatgcaaattaaaacagtgagatactatttttaaccaatcgaattaactactaataaaaaaaagattcaatgctagacagtgtgcagtgaaacaggcatgcttatacagtgctggtggcaatatactggtatatcctttctggaaaggaacctggcaaaatgtattaaagactttgtaaagatgtataattttggacacattaattccacttctggaaatccatcccaaggaaataatcaaagattcaaagatttcctaaggatgttcaacagtaacattatttttatttttatttatttttttgagacagagtctttctctgtcttgcccaggctggagtgcagtggcgcaatcttggctcactgcagtctctgcctcccaggtttgagcaattctcctgtctcagcctcccaagtagctgggaatgcaggtgcatgccactacacccggctaatttttagtagagatggggtttcaccatgttggccaggctggtcttgaactcctgacctcaggtgatccacccacctcagcctcccaaagtgctgggactataggcatgagccaccatacctggccaacagtaacattattaataatgcaaaatcagaattaatatgagaacaaagttaaataaatagtggtaaacctacagacatactgattatataatggaaaaatgctatcagtagtgttaagtcaggtgcccaaatcttgtatatttaatataatcaggtctacgtaaggcaaaaaataatactctgtctttaggtaatgggatcatgattttcccctcatccttctatttttaaatttttttcatagtttctacaatgagcatatatcatttttatccaagtgctatgtccttcagaaggaggcagaggtggccttccagcctgctggatttatggtggtaatctattccagattaaaggctgaggctgtcagaaatctgacaataagtaaatggtgtttagttgtactacttgccacaaagtgaactacacaacacaaagcaatcaagaaaaaaactgatcccatctaatgaaatctaaggataaattaattttccaaaatgtatgacaaagagcaaaccctgatatgtgcaatcagaaagaacaaaaactagtatttaccgactgtttctagtgtgtcagcagtgtgttacatactttttttttgaggcacggtctcactctgtcacctaggctggagtgcagtggcacaatcatggctcactgcagccttgacctcctgagctcaagcaatcctcctacctcagcctccagagtagctgggactacaggctgtcaccatgccagctaattaaaaaaatatatattgtagagttagggtcccactgtgttgcccaggctggtctcaaactcctgggctcaagcgatcctcctgcctcagcctctcaaagtgttgggaatacaggcgtgagccactgcacctggcctacacattttattacattttgatctcattcatcttcacagcatgaggacatacttaccacagcctcaactgcaggcgaattgtcccctaccaccagtaaagtagaacacctaggtaggcaaagtaagaggtgtcactcagcaaataggcacataaattccactgaacaccaaattagtctatgaaagtctatgaacaccaaattagtctatatttggcaagtcagctgaggaaactgaggaacttactttaatgtttttgatttgttatcattttggcccagtatgggtctttcgatctccaggtctctgcgtctagaaaaacaaagcagaagcaatgccctttttgggtaaagtcatagcaactcaggttattttctggtcataaacaccaaaatttatcaaggaatgcgaaactatctttccttcacacctgagaagggaagaggccctatgacttggttcttgagtcgccatttcagtggcatcctgggtggtatggagcaggaaggaagctcttggctcaaccctgaaggactctttgggatgctacaaggagacagcctcaacacccaacagcaacaccactgaaactctcaagtcctaagtgtttaattaatgtatttttttgagacacagtctcagtctgtcacccaggctggagtgcagtggcacgatctcagctcactgcaacctccgcctcccgggttcaagcgattctcctgcctcagcctcccaagtagctgagattacaggcgcccgccactacacccggctaatttttgtatttttgtagagatggggtttcactatgttggccaggctggtcttgaactcctgacctcatgatccgcccacctcggcctcccaaactgctgggattataggcatgagccaccacgcccagccctaagtgtttaatttacaggaataaattccttaagagaatgacttacactttgaggaggggggaggggtgttttccttgtaactgagtttagcacagggcttaatctttctgatttcaactaaaaatagggaggctctgttatacagaggaaagagctaaagagacaaggttcaaaatctggctttactccttactggctgtataattttgggtaagttacagctgatccatttcctcaatctttgtccatgtttctagaaagccagaaggggctcacattttcacctcggagaagctggtcccaagattagatacagtcctctctccttctcccaccctcctctttttagaacctgtttacatttaagtgaagaaacaggaaaaaactatacccattgtaggaattcaagaagagctgcaggttgtcttggttgatgtcttgggcaatatgcattctgtaggtttggatcaggtccaggttggcctgtaactcttcctagaacaattgaaagaagacatgggtaagcttctgagctccagaataagtccatcttgtttggtttgcattttcattaccacaagccaaatcgtgcggctcatgatgggaactggggcagagcctggggactactgatgtactggtaggctgaatgactgattatttgcatcagactggttcagtgctatattctgtgtcagatgagggcagcaaaagacctattatggattcaagtactagctgtggaacttaggtcacctcgtcactctgaaccctgatttctttgtatgtttttttaatgttctgccattcttcacaaaaacagagatattgtaaaatgaagacaataaccagctatctgacaaggctgttttaaagattaagtaagaaaagttatataaacatataaaccataaagtgtaaaacaaatggaatgtaacatttcttttctttttttataagatggagtcttgttcagtcacccaggctgagcaatggcgcagtctcagctcactgcaacctccacctcccgggttcaagcaattctcctgcctcagcctcctgaatagctgggattagagatatgcaccaccatgctcagctaatttttttgtatttttagtagagacggggtctcaccatgttggccatgctggtcttgaactcttgacctcaagtgatctgctgcacctggctacatttcttttaataaccataaatctttaataaccataaatctatagcttcactgatataatcagcatattacctatctatatataccaccatttaatattacacattgtataattatatattccattgcgtttatgacactttattgatttagtaattcattatttattttaatcttttaaattttattttagagatggggactcactacgctgctcaggctggagtgcagtggctgttcacaggcactatcataatgtactgcagcttggaactcctgggctcaagatcctcctgcctcagcctcctggggagctgagacaacaggcacactcaactgtgcctggctcatttattttaatcttattaccaatacttttaaaggtataaaatacgagagaaacaaaatggtctatgcagtgaaaagtctccctctccaccacccactgtttaatggtcactctgttgctggccttctcagatgtcatcagagctagctgccagattcttgagtacataagcatacatgtaaatacgtgtgtgcatacacacaacatcaataagcagttttaagcataaagaaattgcattggaggaaagaaatatatcagggataattaagaagtccgttaatccagggcaatgtgtaaagttcaccaccaagacttgttagagaaatagagacatggaaaaaatttcttcacattttcacaaccatgtggatgaaatgaacccagaatacagctggaaattgacaagcgtctacctgaaactgaagggtacgcgaatcactactagaaaactttgtgagagtcccagtctcattctaaaggtattataataagaaaagtgaataccaaatgacaggccaggtgtggtggctcatgcctgtaatcccagcactttaggaggctgaggcaggaggatctcttgaggccaggagtttgagaccagcgtgggttaacatagtgagacccccatctctacaaaaaaatttaaaactagcttagtgtggtggtacgtgcctgtagtactagctactcaggaggctgaaggaggaggatggcttgagcccaggaggtcgaggctgcagcgaactaagatggcaccactgcactccagccaggacaacagagcaagaccctgtctcaacaaacaaacaaataaacagactcccatctttttaaaaacacaaattatagtcctctagatattgttctacacttgctttcccttgtaaagtatggtagagatcattccttatccggatatatagagctatctcatttatttacactacccatcttcccacatccttgctagtacaaacgtatttttaatttttttctcttattggtgaagttgagcattattcatgtttaaaaaccatgtttgtttccatttcaaattaatacaagcattaacttgcttacatgttttaaaatttatttttaatttttattatctttttgactggtcaagagcagtggtgagaaaggggaaagagtggaacagggaattcaatctgtaactaactgtgaacaatcaattcagataattccctaccttcagaccagcctggatgcttaaattttaaatgaactcttcagtcttatgacaatccactatgacctcatatgttttaaattaaacatatattttttatatatatgtacatacatagttatatatatacatagttatatatagagagagataaattgtatatatagcgagagaaatatatatatatatgtaactatatatatagtgaggatgttcttgcttttcagaaattattaaatactggccttagctttcccctcagaggcttatatgaagtagtatttctttttgctatgttgcccaggctggtctcgaattatgggctcaagtgatcctcccatcacagcctcccaagtagctgggaacacaggcatggctactaagcccgtctgatttttgaatttttttttttttttgagacagagtttcgctcttgttgcccatgctggagtgcaatggcgcgatctcggctcaacgcaaccttcacctcctgggttcaagaaattctcttgcctcagcctcccgagtagctgggattacaggcacgtgccaccacacccggctaattttgtattttttttttttttctgggatggagtcttgctctgtcgcccagagctggggtgcaatggtgcgatctcagctcactgcaacctctgcctcctgggttcaagcaattctcctgcctcaaccttccaagtagctggtactacaggcgcgtgcaccacacgtggctaattttttttgtatttttagtagagacagggtttcaccatgttggcctggctggtcttgaactcctgacctcgtgatccacctgcctcggcctcccaaagtgctgggattacaggcatgagccaccgtgcccagcctaattttgtatttttagtagagacagggtttctccgtgttggtcaggctggactcgaactcccaaccttaggtgatccacctgccttggcctcctaaagtgctgggattacaggcgtgagccatggcgcgcggccgatttttgaatttttataaagacagggtcccactatggcggacctgcctcagcctcccaggtagcagggactacaggcatacaccaccacatcccgctaatttttgtatttttagtagagacagagtttcaccatgttggccatgctggtctcaaacacctgacctcaagtggtctgctcacctcagcctcccaaagtgctgggattacagatgtagagccactgcgcctgacccctaatttgtagtatattaatacaatgaactgctgctacacagtaataaaaaagaatgaactactgacacatggaatgacatggatgaatctcaagacagtatgttaagcaaaagaagccagactcagagaagtacacactctgtcattccatttatatgaagtttcagaacagtcaaaattaatctatggaggtaacagaatagtgaaaatcttgtttggggtggggaattattgagtgggaaaggataatgaggaaacctttgtggggtgatgaaaatgttttgtgttctgggtggtagttacatgaaactatatacatcagtaaatggtcactgaggtgcacttaggatgtgtgcattacactgtaagtattacctcaattaaagagagggcaagatggaggcaaaactcaaaggagtcagctggaagaattaaagtggttgccactaaaaagcagaatatggggtaggtgacagattctttgtaataagccctatagaacttctctactctaaaatatatgtgaatttgtaactttgataaaaatatgatgaaataaaagactgtggattttggacttggcctgacctggattcaaatgtcagctccacacttacaatctggatagtggtggcaagttatgttgcctctctggtctttggtttccctatcttaaaatcagactaatagaaccatgtaaaaaacaacttggtttgcacatctaaagtattataaataatcagtactcgataaatgctagttttcttcccatctgccattttccttcagataacatttaaaattaagcagaaaacaattgagcacccactctcgtctccccattctagacacctcacagctttctgacctcactgctcatttactccatcactcctttgtcagtcacccaactcacttttccctttgaagaagaccaggttccccctcacctaccaattaagctccctcccctacccagcaattatgaacacgataactgccactttctgtgaagacttgtttcctcaccagttgaaaaacatggggcttgaacaagataatctctaagcttcttttagcactattatttcaaggtttttccccctgaaatttctatttctgtgaagcctttcccagacctcctaatggctctaaagatgtttggggaggcacgtgatgtcaaacattaacagatggcattctacttacaggaacaggtagcaggagatgctgtcttctctcatagctccacatgtcaacagctatgtggcaatgagttaaagattcacctttgcagggccacatgcctttcagactacattggaactgttacttgctaggatcaggtaaattctaaggcagcccttctttcctaaggtaaaataagaatttgcatgcaagccaataaacacagctcttctgggtggaacaggtacttacctgcccaaagtgatgagccaaaataatgtccacaacattggttgtcaggccagagagctgaaaagataaaaactctgtgttaagaatgtaagcatatgcaaaaatttatcaagctgcccaattaaaatgagtgcactttattatatatgttatctctttaaaaacaaatgaaaaacccttggccaggtgcgatggctcacgcctataatcccaggactttgggaggctgaggcgggcagatcatgaggtcaggagattgagaccatcctggctaacacggtgaaaccctgtctctactaaaaatacaaaaaattagccaggtgtggtggcaggtacctgtagtccctgctactcgggaggttgaggcaggagaatggcatgaacctgggagacagagcttgcagtgagccgagattgcgccactgcactccagcctgggcgacacagtgagactccgtctcaaaaaaaaaaaaaaaaaaccccacaattcagtgttatacatttcatgagatggtggtttcaaagaaacatagagatgagaaacaagtcagaaaaactaagtctcctttgcagggtaataataaagcctgctatgaaataggggactggaaggacaatgtcaattccttctttgaaagcctgagacctagacctcacggctgtttgctactttattcctgtctgtatttctgtatttacactggatttatggctgataaggactaacttaacaatcactcccatgacttccaagagacaaaaacaatttttttcctctttcttccagtttttgctatcttcatttcagggagtgggaggaaatgagttgtttacagaatgttcttgagttttaaacatttttctcctaatttttcccttttcaaaatgatgcatctcacagtctaataaatgcagcaatctgtgtaaatctgcatactgtagtctattttcagaaaaatttccaactcaaattatgttgctgattcctgttcggccttcttccttggttttatgctgaacctgtactgctgatcagggatgaagtactgaattgggggtaagaatggagaagaggcactgagggagacagacatggctatgcctggagtaggatcatatagttccagaaagactgaggaagaaagaagtcctgaaatcttcacataggttatcagtgatgcacaggttatgaactatagaaaagtaggctgggcgtggtggctcatgcctgtaatcccagcactgtgggaggccgaggccagcggatcacctgaggtcaggagtttgagaccaggctgaccaacatggtgaaaccctgtctctactaaaaatatacaaattagccaggcgtggtggtgtgcgcctgtagtcccacctactcaaaaggctgaggcaggagaatcacttgaacccaggaggtggaggttgcagtgagccgagatcatgccactgcactccgccctgggcaacagagcaagattccgtctcaaaaaaaaaaaaaaatgtacccacatattaagaaagaattaggacacgattgattgacagggtctctctctgtcacccaggctggagtgcagtggcaccatcatagctcactgaagccttgacctcccaggctcaagcgattttccggcctcagccacccaagtagctgggactacagttgtgcaccaccacgccaggctaattttttaaatttttgtagagacgaggtctcactgtgttgcccagggtagtcttgaactcctgagctcaagcaatcctcctgcctcaccctcccaaagtgctgggattaccaatgtgaaacactgcgcccagccaggacatattttaaataagccaggctgtgagaaggaatttccatagcatctggcaatagcactgttaatgtgttttagctaagaaatacctcatttctccaaaatgtaaacataggaagagatggataaatgatttagaatctagtttgctgatgactagaatattttaagttttaataaaaatatgcttatcacaagaaattacgaaaaaacagaatacaaaagacatcatttgtttgttttctttttttttgagacagggtctcgttctcttgttctatcacccaggctggagtgaagtggtgcaatccagggtcactgcaacctccacctcccaggttcaagtgattcttcaacctcagctcccgagtagctgggaacacaggcgtgcaccaccacacctggctacgtttctgtatttttagtagagatgggtttcaccatgttggccaggtggccaggccggtcttgaactcctgacctcaagtgatccgcccactttaatgaatactttaaagcattaaaacaatgctttaatgaatattctgggtttgcaatttactagcagtgtaattttaagtaaataatgtctctgtaggatagtaatgataccaatggattgtcctgaggctgaaaagttaagtatatctaaaacatttggccgggcgcagtagctcacacctgtaatcccagcactttgggaggccaagacgggtggatcatgaggtcaggagttcaagaccagcctgaccaacatggtgaaaccctgtctctactaaaaatacaaaaattagctgggcgtggtggcacgttatctgtaatcccagctactcaggaggctgaggcaggagaatcacttgaacctgggagatagaggttgcagtgagccgagatcacgccactgcacactccagcctgggcaacaagagtgaaactccgtctcaaaaacaaaaaaacatttaagaacagtgcctggtacacagtaagcactacataggtgttaccttttttaaaaatttattatccatctctttaaatcttttttttcttttttgagatggagtctcactctgtcacccaggctggagtgcagtggtgcaatcttgactcactgcaaactttgcctcccgggttcaagtgattctcctcctacctcagcctccccagtagctgggattacaggcgtgtgccaccacacctggctaatttttgtatttttagtagagacagggtttctccatgttggtcaggctggtctcgaacttctgacctcaggtgatccgcccacctcgacctcccaaagtgctaggattacaggtgtgagccaccacgcccagccctctttaagtctttttaaggatcactaactacctttcaaaaaagttcctagatatggacttattgaatctcatggtttgagtatcaataaagcttttttttttttttttttttaagacaaggtctctctctgtcacccaggcaggactgtagtagcatgatcatggctcactgcaaccttgaacacctgggctcaagcaagcctttcccttcagcctcccgagtagctgggactacaagcgtgtaccaccttttaaatttttgttgacacaaagtcttgttctgttgaccaggctggtcttaaactcctggcctcaagcgatcctcctgtcttggcctcccaaagtgctaggactacaggcatgagccaccatgcccagccagattttttttttttttttttttttttttttttgagacagggtctctgtcacctagtctggagtccagtggtgtgatcatggctcactacagcctcgacctgctgggttcaagtattcttcccacctcagcttaccgagtagctggaaccacagacgtgtgccaccacaactggcatttttttttttttttttttttgagacagtctcgtctgttgcccaggctagaatgcagtggcatgatcttgactcactacaacctccacctcccaggttcaagcgattctcttgccttagcttcccaagtagctgggattacagacatgtgccaccaggcccgggtaatttttgtatttttagtagagacggggttttgccacgttggccagggtggtcttgaactcctgacctcaggtgatccatctgcctctgcctcccaaagtgcggagattacaggcatgagccacctcacctggcccgcaacgggctactttttaagttgtttttttttggggggtgggggggatggagttttgctcttgttgcccaggctggagtgcaatggcacgatctcgactcactgcaacctccacctcccgggttcaagtgattctcctgcctcagcctcccgagtagctgggattataggcatgcgccaccatgcctggcacattttgtatttttagtagagacggggtttctccatgttggtcaggctggtctcgaactcccgacttcaggtgatatgcccacctcggcctcccaaagtgctgggattacaggtgtaagctactgcacctggcctacttttaaaattttttgtagagatggggtctcactatgttgcccaggctggtctctaactcgtgggctcaagcgatcctcctgcctcagcctctcaaagtgctgagattacagaggtttataaaccaccgtgcccagccaataaagactcttgatacatttgacaagttgggtggtggtattttggagactttatcctgcaatggtgtattagaacatttacggcaatgtaaaagtactgagaagtaagcatttgtttaaaatgagattaacggctgggcgcggtggctcacgcctgtaatcccagcactttgggaggctgaggcgggcggatcatgaggtcaggagatcgagaccatcctggcgaacacggtgaaaccccgtctctactataaatacaaaaaattagccgggcttggtggcgggcgcctgtagtcccagctacttgggaggctgaggtgggagaatggcgtgaacccgggaggcggagcttgcagtgagccgagatagtgccactgcactcctgcctgggcgacacagcgagatccgtctcaaaaaaaaataaatacatacataaataaataataaaatgagattaacagattaggcatcttttagcaggaaataaaaccttaattttctctctggaaatcagtgatttattataaaataccatagttttagattaaaataacatacacataacatttgtacttcatcaagaaaatggttcaaaactttttctaacctaaaaagtgtttttgtttgtttgttttttgttttgttttgtttttttgagacggagttttgctcatcacccaagctggagtgcaatggcacgatcttggctcactgcaacctctgcctcctgggttcaagcaattctcctgcctcagcctcccgagtagctgggattacaggcatacaccaccaggcctggctaatgtttttatttttagtagaaacggggtttcgccatgttggccagactggtcttgaactcctgacctcaggtgatccactcacctccgcctcccaaagtgctgggataatgggcgtaagccacgtgcctggcctaacagtgaattatttttagcataggtgagttgaatgcaagtgatggcagtggctgctgccatcacgctgtgtggctggggctgcacacgccatggagctggcggaagccccgccccttccgggttgggaccagagccgcagacccaggcctcctgctctatggagcaagcaggatccccgccctcctgggcagggctacagccgcccaaactgcagctgtggatctcagcctccctgtgctcttgggggaactgggaacaggcaggatttgccttcccaggtacagctgcagccgctgcgcctgtggctgcagacctgggcctctggctccgggaagcgagcaggagctggggacaagcgggagccgggccccttcccagctggcgggctgggagctcccaggtgcagctgcagccgccctcccaggcgtaggactggggcatctctgcagcctgcacccttgggcgccccaggaagggcccctccaagccccggggccatgaatggagcgggacgcaggcagagtcctgggcagaagggggcagggttcccagtaaggccccaccctcaggccagggaggccctgaaggctacgggctggattgccagtcgcccagaccagtcaggacttgtggcacctcttcccggcctgcccatggccgcccatgggccaatcagcatgcacttcctcccttctgaggtccataaaagccttgggctcagccagcgcagggtagaggatggccagaggacaaagaaggtagagacactggacaaccagctgcagagaggaatacactctccactgagcgcttcagggacaacctgctggcagagaagggctactctctctgctgagagcttcagagacctgcagagaagtcggaatgactcgcctgtggaaaggaaccaccttctccagggcctcctgtcggcaaagagctgaacactcgactggacgacctgcctacagagaggagctacccattcctctgagctgttctaacactaaataaaactcttcttcacccttcacttgtctgtgtacctcactcttcctggatgcaggacaggaactcaggcaaaggtgctgtggccacagaagtttctggctagacaaatcaacaccccagagatcccataacacaagggatataattttttccttattcccacttttctgttttaaaaaaatgtcctctcccaacagaatcacccattttttactctggtttgggactgggactgggagtgcttatatttgtaaagtcattagcattccctttagtttcctatctccttgaatggattttagaggttaaattccttcctttttgagttagcaaacaccagcaatccacatgtcgttggaaggagtagcacagataaagtgctggggttcactgtggagtgattcattcatttcattcagtaagaataagaaaatgcaaactatagactaggagaagctatttgagatacatgtacccaggacgcacatacagaatattttttaaagtggggaggggaatgagggtgagggcaaaagagttgaacaaacacttcacaagaggatattcaagaaaagatgcttgacatcactgccccttagggagatgcaaattaaaacccaggattggccgggtgcggtagctcacacctgtaatcccagcacttcgggaggctgaggtgggtggatcacgaggtcaggagttcaagaccagcctggccaagatggtgaaacactgtctttactgaaaatacaaaaatgagccaggcatggtggcaggcacctgtgatcccagctactcgggaggctgaggctgagagttgcttaaacctgggaggcagaggttgcagtgagccaagatcatgccactgcactccagcctgggcgacaagagcgagactccgtctcaaacaaacaacaacaggattatctatctataagcatagcttaacatttaaaagatgatgtaattaaaaattcttattttaatgactaaagctattttggtaatggaaaacataaaaacaaactaatatcacaaataaaactgcttgtcttttactaaaattaaaagtacttataatatcaaatgttggtgatgtggagcaactgaaactttcacgcactgctgttgtgtaaatggttaaatactttgaagacattttcatttactttatttttatttttgttttctttgagagagagtctcactctgttgcccaggctggcgtgcagtggcacgatcttggctcaccgcaacctccacctcctgggttcaagcaattctcctgcctcagcctcctgagtagctgggattacagatgtgtaccatcatgccccacaccccagctaattttcgtatttttagtagagacagggttttgccatgttggcctggctagtcttgaactcctgacctcaagtgatcctcccacctcggcctcccaaagtattggcattacaggcgtgagctaccatgcctggccttggtcaaatactttggaaaactgtttgattatatctactaaagctaaacatacaaatgccctatgacatagcaatttcactcctaggtataaacccaagagaaataaatgtgtatgtctactgaaagacataaggaatatgcacagcagctttactcataagatccaaataacagaaacaactcgttctgtgtattcacacaataggttactaaagaaccgtttagaactcctgttaaattgcaattttttttttttttttgagacagagtttcactcttgtcacccaggctggagcgcaatggtgtgatctcagctcactggaatctccacctcccaggttcaagtgattatcctgtctcagccccccgagtagctgggattacaggcacccaccaccacgcccggctaatttttgtatttttagtagagacggagtttcgccatgttggccaggctggtcttgaactcctgacctcaggtgatctgcccaccttgacctcccaaagtgctggaattacaggcgtgagccaccgcgcctggccaaattgtaatttatttatttatttatttttatttttttcagatggagttttgctcttgttgcccagactggagtgcaatggcacgatcttagctcactgcaacctctgcctcccaggttcaagtgattctcctgcctcagcctcccgagtagctgggattacaggcatgcaccaccacacccgactaattttgtatttttagtagagatggggtttctccatgttggtcaggctggtctcaaactcccgacctcaggtgatcttcccgcctctgcctcccaaagtgctgggattacaggcatgagccaccgtgcccagtccaaactgtaatttagaactactgctacatacaacttggatgagtttcacagacaccgtgatgaaagaaaagaaaccagacaggctgggtgcggtggctcacgcctgtaatcccagcagtttgggaggccgaggcgggtggatcacaaggtcaggagttcaagaccagcctggtcaagatggtgaaacctggtctctcctaaaaatacaaaaaaattagccgggcatggtggtgggcacctgtaatcccagccactcgggaggctgaggcagagaattgcttgaaccgggaggtggaggttgcagtgagccaagatcatgccactgcactccagcctgggcaacagagtgagactccatctcaaaaaaaaaaaaaaaatacagtttctatgattccaatttaacagataaaactgtttaaaaacagataaaacttatctctggtaacaacagtcagaacaggtaatttctgggaaggagaggaagtatcaattaggaaaagatacaacggaatcccctagtgagctgggaatattctatatcttgattggatggtgattttatatgtaaacattcttcaagctatatacttaacatttttacccttaactgtatatatacctcaatgaaaaactggtaagctgttttgagatgggccaagataagccgatggacaccttcatgtggtacttactttggaagctgcccagtcaatccagcctttagcgcaagggtcaacattaatgagcacaaggccttccacaagctctggatggttgagctgaaagatgaggcaaagacaatagtatgaaagctacactcccacagttcttctaaacagttggaacatggttgatcaattcttacttacatgccttaatgcctcacatttgaaagtaagactacaaagagggagaacatgtggaaaaatagctcttgaaatctgacttagcatatggaaaccagtttctggttttgctatcaaattacttattttactatcaaattatcttgtcttgcaaagatctatatgcagttgttcaattcatggtggatcttcctcattgggaaagtgcgcttggcacaagcagctgctccatgctcatatatctttgttctcaacagaggcttctgaagtttttttttctgaaaccatctgaacagtctgtatcatcctcagaagactctcctatcactgaggacgtattaaaaaaaaataatgataataatgtctggccgggcacggtggctcacgcctgtaatctccgcactttgggaggctgaggagggtggatcacgaggtcaggagttagagaccagcctgaccaacatggcgaaaccccatgtctactaaaaatgcaaaaattagctgggtgtggtagtgggcgcctgtaatcccagctactcaggaggctgaggcaggagaatcacttaaacccaggaggcggaggttgcagtgagccgagattgcaccactgcactccagcctgggcgacacagcaagacttcatctcaaaaaaaaaaaaaaaaaaaatttataataggagctctagctctctagcttatttaatttaatttaatttaattttctttttgagacagagtttcgctcttgttgcccaggctggtgcagtgatgctatctcggctcactacaatctcggcctctaggattcatgcaattctcctgcctcagcctcctgagtagctgggattacaggcacctaccaccacgcccagctaatttttgtatttttagtggagacggggtttcaccatgttggccaggctggtctcgaactcctgacctcaggtgatccacccgtgtcggcctcccaaagtgctaggatcacaggcgtgagccaccgtgcctggtccctggcttactttttttctctgactacagtgattatattcacgatagaaaatttgataagcagagaaattataaaaagcagaaaataaaaatttcacattatcttaccacatatcaatccattaatattttttggtacattttcttccagtcctttcctatggctatgacaaactttatgtcaatctatattctaactttttggttaacattataatgtatgcaaaccatgtatcattataaagcttttcgtaaacttaattttaatggccgcacaaaattccattataagcagcatctaggacttgctttttattgatgatgtactgtccccatttgtgatttttcaggtattgttaagtacaaagctaggctttatacaacctgtatctaaagctgacagaagttacagaaaaactgacataaggcccagaatactgcctggtcatttaacacagcagtaatagctgtgacccaggcactgcctcaaggatgttgaggctaatcctctacatacttactgcaaatctgctgaggatgtaagctccagctccaactccaattccaatgatgcttttcaggctgtgaatgggacataacgacaactgacagagtcaacttcatttgcaggcagcattgcataattgaaagcatacaacctgggttgaaatcctggctctgatatttattagatgtgagaatttgggcaagtgttttttttctttcccctaactttctgagcctcagttccttatttataaaacaaggatctcagctgggcgcagtggcttacgcctgtaatcttagcactttgggaggccgaggcaggcggatcacgaggtcggcggatcacgaggtcagcagatcaagaccatcctggccaacatggtgaaaccccgtctctactaaaatacaaaaaattagccgggcatggtggcgtgcgcctgttaaaaaaaaaaacaaaggctgggcacggtggctcacgcctgtaatcccagcactttgggaggccgaggcgagcggatcacgaagtcaggagatcgagaccatcctggctaacacggtgaaaccccgtctctactaaaaatacaaaaaaaattaaccagacatggtggcgggcacctgtagtcccagctgctcgggaggctgaggcaggagaatggcatgaacccgggaggtggagcttgcagtgagccgagaatgcgccactgcactccagcctaggtgacagagtgagactctgtctcaaaaaaaacaaaaaacaaaaccaaaaaaaacaaggatcccaccaactactttcaagttggttttaatggttaaataaaatataactgagaccgggggcagtggctcacgcctatgatcccaggactttgagaggccaaggcaggtggatcattgaaggtgaggagttcgaggtcagcctggccaacatcatgaaaccccgtctctactaaaaatacaaaaaaaattagccaggcatggtggcctgtgcctgtaatcccagctaaatgggaagctgaggcaggaaaatcgtttgaacccaggaggcagaggctgcagtgagctgcgatcgcaccactacactctagcctgggtgatggagtgaaactccatctcaaaacaaataaataaataaataaatatatgtatatatatgtatatatacatatatatatacacacacatatatgtacacacacacacacacacacacatataaaaatatatataactgaaacctgggagttatccttggtagctgtcagtatccaacccatcagcaagtcagtggagtctatctccagaatatatccatctacctactactatctacttcaatcatcccccaacagcagcatccagtaccatgctatcattatctcttgcctggactattgttaatagtttaactgttctccctgctttctctctctgattcttctccaaaccattctcttctcagtgagatgaacgtttttaaaaaaatttaaacagctttatttttattttttagatacagggtgtctcactgttactcaggctggagtgcaggggtgggatcacaactcactgtagccttgaactgctgttgttaagtgatcttcctgccacttggcccagctcaaggtagatttttaaatcttctaggtctcagcgtgtgtgccaccttcctagagaggaattccctaacttgccttactaatgtagatcccacccttattctctatcacaacacccccactgacttattttatagaactttattatttgtttgcttacttgttaccccactaagctctaggaggacagtgataatatttttcctaaccatcatatcctctgaaacagacactaaataattcaccatagaaagtcaataaaaactgcatgaaagactgcagaatgaacctaccttaggtgggtaagaacaggaggcagcatttcagccagctcatccattgtggggtactgatacctgcaatccagaaggatatctcctgaattagaaagcactcacaattcccagttgctagaacagctggaaaggtccagaagtcttagataaaaggctgagcgcagtagctcatgcctataatcccagcactttgggacaccgaggtgggcagatcacctgaggttgggagttcgagaccagcctgaccaacatggagaaacctcatctctactaaaaatacaaaattagctgggtgtggtagcacatgcctgtaatcccagaaacttgggaggctgaggcaggagaattgcttgaacctgagaggcggaggctgccgtgagcggagatcatgccattgcactccagcctgggcaacaagagcaaaactccgcctcaaaaaaaaaaaaaaatcttagataaaagcatttccttttaccaaaggctcaaaggaggtgatgtggtaccctgaaaatgattgtggcatattgtgtaactctctacaactgccatgctaaggagaaagtaaaataatccacggtttctatatcctaacaagcagcccttgggaccagagggtgccacatgaaaagaactagtaacatggttctctcttagggtatttccaaacctctaacaatctcttcagttggagtccaggctcagtaaacctccggcagtaagagtcaactcagaaagggggtcttggtctactgctatatttaggcaactaaatgcaaaaataaagcttttctaggtatgggcacacagttacaaacccttagcatgaatgcttatttgtttcacttaggcatagaataacatagttatttttaaaattttattattattattattattattattaattttttaagagacatggtctcactctgtcacccaggctggagtgcagtagtgaaatcatagctcactgtaaccttgaactcctgggctcaagctatcctcctgcctcaggcttctgagtagctgggactacaggcgcatgccaccatgcctggctaatttttcaattttttgtagagatggagtctcgctatgttgccagggctggtcttgaattcctggcctcaggtgatcctcctacctcagcctaacaaagtgctagaactacaggtgtgagccactgtgtctggcatggttattttattgtatttgaatttggttcataatatgaaccatctgatcctaagatgttcgagcaggcccaggaacagacccagatcagaattcctagaaaagtagtaagcatccgactgggagcgttggctcacgcctgtaatcccaacactttcagaggctgaggcaaccagattgctcaagcccaggagttcgagaccagcctgagcaacagggcaaaaccctgtctctacagaaaataacaataattagccaggcgtgttggcacacacttgtagtcccagctagtagggaggctgagatgggaggatcacttgagcccaggaggttgaggctgcagtaagccatgatcacgccactgtactccagcctgggaaacaaagcactatcctatctcaagaaagaaagaaaaagtattacagaattggagatggaattgatcctaagatgaccacttatatatgaggcaggatctgttctacatctgacagggaagtcagcctgcctctgcctgaacacttaaggggatggtgtgctgtggaaccatttgtccacaaaatagaaaaaaggaactggatacaaatcttgttggatataaactgaccactggccaatttgcattttagagtcagattctggcaccagactgtctgggttcaaatcttagctctgccacttatttgttatgtaatgttagccatgttacttaatttttctgggcctcagtttcctcacttataaaatgggaataatagtaaacttatcccatagggttgtgaggagtaaatgagttaacaaatgtaaagcatttaaagcagggtctggaacacggtttgagtactatttaaatattagctattatttgtctgcaattgtctatttcccagcagtcactggccaaaggcagctctggagatgagtgaaaggataggggaagaattagcattccacagagtgtgtgctcactcctcctaaggtcttctcaataagcacccgtccagggaacaaacaggtagggagcctatgactctgccctgcgaagcagatgtaggaggaagctgagagtgccaaagccaatcaatcaccccacacctctatctgccaggacagcctctcagaataaacagttacacagatagtcaaatttccattactagtttgagagctaaggatggggagatgctcccaggaaagctcagagagatctgaatttgggcctaagtagttgggagttttgaggaaggacacaaaaatgacaggtttttttgtttgtttgttttctttctggggacagggtcttgctcagtcatccaggcactgcagcctcaatcccctgggctcaagtgatcctcccacaacagcctcccaagcagacacgaccacaggtgaacaccaccatgcctggctggctaatttttcaattttttgtagagacaaggtattcctatgttatccaggctggtcttgaaccccggggctcaagcaatcctactgcctttgcctcccaaagtgctaggattataggtgtgagtcaccacgtctcgctaaaaaatgacagctttcaaacagataaggaagggaaagataaagacagtgaggagtagatgttccagacacttatgccttgagattacaggaaagcaggcacctgctatggagagccattcctggatatgggaaaacacacagtttcccccaaaaaactgtacataacagtcctctcagcccaaggagagaaaatatgaggatggttggtcaataagcataacctatagacggtaataaaatcaaagggaagcacacaccacttctcccactggagctcagccagttgctctactgagtgcacgtctcccagatgatcttttcgtggccttaccctgttgggaaagagggtgcaccttcctgctggcctggggcatccacatgacagacagcaaagtgctgggtgatctcttgcatatcctcaaagttaaagaatgcattgaaacaggatttatctataagaataaaaatacccataagtcacaggctctccatatcgccccaattttcctctactcagtcaatgcctattatcaccttctttccctgctttttaaccaccattccaccaaagtgaggtgtctgaacaatctgtctgattcaagctgccctaaaggctgaatataagacatctcatattgagatacatattgaaaacaattcttaattctaaataatgtctgcaaagtagaaattactttgttaatatttggtggtttccgattattgcacaaaataatcttacacccataatgctgtcatttctcatggacattattcctctatctcacaaacagacactgattataccccaagagcacaggtggcgtgaatgtcctgagctgttcacattcaccacacgggagtttgtctcttggcaaaattgccagagtgaagggaggggctgctgcttccacttctaccctctttgtatacctgcttaaatcacttctcatgccaaggcagctacaaaagctttaacactcaactgtggcctcaaatgcagggcatctatgaaagccagagcagcatgaaagaaaacacatgtatgcagactctgtgtgtctatggctggggccagaatcttacactaccatctagaaaagtccacttaaagtcactggtgacaggctctagcaagaattcttactaattcattgaagagctcacaacaaagttaagttccaactctgaattttctaacctgaaacatatttaaaaaaaaaaaacagagtacaggcttgaaaacatggatttcagttctactttcttagcagtgcattgtataatctgcaatcctttagcagacatgaaggcgagatgtgattccagtatccccagaatacattcccctgcacacttcccaggaactttataccattaacgaatgtaggaacaaggagggaaagttaccacagagagggggaaacctctgctctattagaatattgttgttgtttggtttttaacatacaaagatcaagtatgataagaagggaaggtgtaaaataaaatacatacggttgaggccaatgtcatgatatgttagtataactggtctgtttcctttgggtaagcctcttatagtgacgtggaccacaccatgagttgtttctatatcatgttcctgtaacaagagaatgtaagttctcagaaaaagcagaatgaacttcccaggttgccaaagtttcacaatacctgctttaccaccgtttcccacgagctggggcaggacacattaataaattacatgtggctgggcgtggtggttcacgcctgtaatcccagcactttgggaggcctaggtggtcggatcacttgaggtcaggactttgaggatcagcctggccaacatgatgaaaccctgtctttactaaaaataaaaaatcagccaggcatggtggcacacgcacataatcccagctactcaggaggctaaggctggagaatcacttgaacctgggaggcagagattacagtgagctgagatcgtgctactgcattctagcctggtgacagagcaagacttcgtctcaaaaaataaaataaaataaaataaatgcataccagagagatgctagagtatacataatattcctactttccaattcttccagaaaaataaatagggagcaaaacacaccttgttatctccaaagctcacttacgagcccagggatctgttgagaatacatttgcaattggctatggaaaggaaatcagcaaattgggtaaggagccaggtaagacttgtggggaaaaaaggaaatggaagatatgaagaagttgctgggtaaaaaatcagaggttttggagcttctgaacacatgttcagataatttataattaatttcagtagataatttcaccagacacctatgggtgtatctgcctaggatcccttctttcctgggagctgtccttctgtgtcatccacacgttacaggggtggatcttggctaccatgtttgtggaacataaacttacggccatagcttactggagtcagggaggcatctggcccaggctgggtcagcacctttcccttggaactaagagatttttttttttttttttttttgagacagagtctcgctccgtcacccaggctggagtgcagtggcgcgatctcggctcactgcaagctccgcctcctgggttcacgccattctcctggctcagcctcccaagtagctgggactacaggcacctgccaccacgcccagctaattttttgtatttttagtagagacggggtttcactgtgttagccaggatggtctcgatctcctgacctcatgatccacccacctccgcctcccaaagtgctgagattacagacgtgagccaccgcgcccagcctgtaattggaactaagagattctaacttcagcttggctctcctcttgaaaagaggaatcaacttgggagattttagtaggcatttccactactctaatttctggtgctagctgtgtatacttctaagttctaagacatccctggactgcctctggtttaagctatattgggtgagtttgtaccctctactcctaaaagatcttaaccaagccaatcagttaaagatgtagccagagcaaagctcaggaaccaaatagagcagacaaaagatgcaccgagcaaagctcaggaaccaaatagagcagacaaaagatgcaccgagcaaagctcaggaacccaatagagcagacaaaagatgcaccgagcaaagctcaggaaccgaatagagcagacaaaagatgcaccgagcaaagctgaggaacccaatagagcagacaaaagatgcaccgagcaaagctcaggaacccaatagagcagacaaaagatgcaccgagcaaagctcaggaacccaatagagcagacaaaagatgcaccgagcaaagctcaggaacccaacagagcagacaaaagatgcaccgagcaaagctcaggaacccaatagagcagacaaaagatgcaccgagcaaagctcaggaaccgaatagagcagacaaaagatgcaccgagcaaagctcaggaaccgaatagagcagacaaaagatgcaccgagcaaagctcaggaaccgaatagagcagacaaaagatgcaccgagcaaagctcaggaaccgaatagagcagacaaaagatgcaccgagcaaagctcaggaaccgaatagagcagacaaaagatgcaccgagcaaagctcaggaactgaataaagcagacaaaagatgcaccgagctgctgagagtagatgccgcactaagagtggttgggtggaaaaaaaagggactactgaaaagttaactgagatttattctagtcgtgctcaagttttatatttctcaaaaataaaaaaattaccattcctatcctagcgaatttctgttgatgaagcctgtatctatcttacaaagtcttacattaggtaagacaagattaactctgtcaatgagaatcccaaaaaaggcaaagggcttccagtttaatttcctatctaataatgaacctcataagagctttggtttcttctctgatgtgggcaccagaagacaatcttaagctaattggacatcagtatatctcaaattacaggccctaggctggagccgatagccatccctaccaaatcaaaccatgtgtgactcaatatttctgttattttctattactactacctcctagtcaagtctattcaaagccttcaaaaatgaacataagaaatgaagactagaatcaggtactgtgaaactggctatgaaataaagtataggccaggcgcggtggctcatgcctgtaatcccagcactttgggaggccgaggcaggcagatcatctgaggtcaggagttcaagactagcctgtctagcacagtgaaactctgtctctacaaaaatataaaaattagccaggcatgatggcaggtgcctgtaatcccagctacttaggagggtgaggcagaagaattgcttgaacccgggaggcagaggttacagtgagccgaaattgtgacaccactgcactccagcctgggtgacagagtgagactctgtctcaaaaaaatataacaaataaagcataaggtttggataggaggaatataaagaaataacttcctatttctgtatttctcttacagtaatgtcagacttattaaaggactcacttcccgaccctggttcattcattaaacatctatttattgaatgccactccatgccagaccctggtctgagttgtggggataaaacagtaaacctgagaaatgtgatcccagtcttcacagagattatgttctacatagggaggcacacaataaacacagaaacaaatccacctgtaataatagcttgtgataggtgctataaaagaaacaactagggtgctacgatagaaaagtaagaagacattaccttcactaaacagacaggaaaatggaaattaaattcaataaaatactatttcatacataccaaaatggcaaaaatgtaaagtcagataatgctaagtggtgaccaggatgcagagaaataactaagaaccaacatatactgttttttacgttttgttttgtttttgagacggagtcttactctatcgcccgcccaggctggagtgcagtggcacgatctcagctcactgcaaccttcacttcccaggttcaagcaattctcctgcctcagtctcccaagtagctgggactacaggtgtgcaccaccaagccccactaatttttgtatttttagtagagatggggtttcaccatgttgtccgggctggtctcgaactcctgacctcaagtgatccacctgcctcggcctcccaaagtgctgggattacaggcgtgagccaccgtgccccacaagaatcaacatatactgttggtaaggcatataaactggaacaactaccaggagaatactttggtaatttctagtaaagttaagaggtgtctaccctacagaaattttaccctacagcaattttacatatagatataatctaaggctggggccttagatttctggtgctagctgtatgtatttgtaaattctgagacatccctggattgcctctggtttaagctatattgggtgggtttgcaccttatacccctaaaggatcttaaccaaggcagtggtggtggctcatgccagtaatcccagcactttgggaggctgaggtgagaggatcgcttgagcccaggagttcgagaccagccctggcaacatagcaagactgcatatctacaaaaaaataaaaacattagccaggtgtgatggcatgtgccagtaatcccaactattcgggaagctgaggcaggagaatggcttgagcccaggaggtcaaggctgtagttagctatgatcacaatactgtactccagccggggtgacagcaagaccctgtctcaaaaaaaaaaaaaaaaaaaaaaaaaaaaaaaaaatatatatatatatatatatatatatatatatatatacacacacacacatatacacatatatatatacacacatatatatatacacacacacatatatatgtgtatatatatgtatatacgtatatatatgtgtgtatatatatattctaaataaactatcaaacatggtcatatacacaaaaggacatgtgcagagatgtacgggtgaccctcaaacaacacaagggttagtggtgccaacccactgtgtagtcaaaaatccacatataacttttgatgcccccaaaacttaactactaataacctactattgaccagaagccttactgataacataaatagctaactaacacatattttgtatgttatattataaactgcaggggtccccaacacctgggccacagactggtaccagtctgtgccctcttaggaaccgagccgcacaggaggaggtgagtggcaggtaagagcaaagcttctgtcttaagagccactccccgttgcactgcctgagctctacctcctatcagatcagcagtgacatcagattctcataggagcatgaaccctattgtgaactaagcatgcaagggatctaggttgtgtgctccttatgagaatctaatgcctgatgatctatcactgtctcccatcacccccacatgggaccatctagttgcaggaaaacaagctcagggctccaacagattctacattatggtgagttgcacgattatttcattatatattacaatgtaataatagaaagtgcacaataaatgtaatgtgcttgaatcatcccaaaaccatcccaaatacatggaaaaattgtcttccacaaaaccgatcactggtgccagaaaggttaaggaccactgatatactgtattcttacaataaagtaagctaaagaaaagaaaatgttaagaaaatcgtaaggcagagaaaatatatttactattcattaagtggaagtggatcatcataaaggtcttcatccttgttatcttgttgagtaggctgaggacgaggaggaacaggaggggttggtcttgccatctcaagggtggcaaagaaggaagaggtggaggaggtgaaaggggaggcaggggaggcaggcacacttgatgtaactttacagaaatacatggtaatttgtctgactttttacactctcatttttctaaaaatgtttctatacagtaccaatccttcttccactgtttactttagttaaagtgtgcgtatcacagaatagttcctgacataaaagaagtgaaaaacagtcttgaataactggaacccttctgccaggctgtctaatgtcaatttgttttctggcactgcttcttctacatattcctcattgcctggcactggttcagaagcattcatctccatcaagttgtcttctgctaattactctggtgtggtgtctactagctcttaaatttctccaaaatccataccttgaaacccttcatcctatgacccacctttttttggtcatattcataatctctgtaatgatccttcattggctctgttgtaaatcctgtgaagtcatatacaacatctctacacagttttctccagcagaaatttattgttttcagcttcatggctttcaaggccttttatttatttatttatttatttattttttgagacagggtctcattctgtcacccaggctggagtacagtagcgtgatctcaactcactgcattctccacctctcaggctcaagcaattctcccacctcagcctctcaagtagctgggaccatagatgcatgccaccatgctcggctaatttttgtactgtttgtagcatcaaggtttcaccatattgcccagtgttgcaggaagtcagggaccccaaacagagggacctgctgaagccgtgatagaagaacataaattgtgaagatttcatggacatttgttagttctccaaattaatacttttacaatttcttatgccagtctttactgcaatctctgaacataaattgtgaagatttcatggacatttatcacttccccaatcaatactcataatttcctatgcctgtccttactttaatctcttaatgctgtcatcttcgtaagctgaggatgtatgtcgcctcaggaccctgtgatgattgcgttaactgcacaaattgttcgtagagcatgtgtgtttgaacaatatgaaatctgggcaccttgaaaaaagaactggataacagtgatgttcaagggaacaagggagataaccattaggtctgactgcctgggagctgggcaggacagagccatatttctcttattgccaaaaacaggtaagagcaatatcgctgaattctttccccagtaaggaatattaataattaacagccctgggaaaagaacgcattcctggggggacggagggggatctctaaaatggccgctgtgggagtgtctgccttatgcagttgtagatagggatgaaacacgtcctggtctcctgcagcgcccccaggcttgctaggattaggaaattccagcctggcaaattctagtcagaccagttctctgctcttgaaccctgttaagatgtttatcaatgacaatgcatgcacagcgggacatggaacttcatcaacaattctagtttcgccctggccttgtgaccttgccctacccttgtgaccttgccctatccatttgccttgtgatattttattgcccttgaagcatgtgatctctgtgacccacaccctattcgtatactccctcccctttgaaaatcgctaataaaaacttgctggttttacggctcagggggcatcatggaacctgccgacatgtgatgtctccccccggacacccagctttaaaatttatctcttttgtactctttccctttatttctcagaccagccaacacttagggaaaatagaaaagaacctacactgaaatattgggggattcccccgatagcccaggctggccttcaactttgtttttttttgagatggagtttcactcttgttgcccaggctggaatgcaatggtgtgatctcggctcactgcaacctctgcctccccagttcaagtgattctcctgcctcagcctcccaagtagctgggattacaggtgtgcatccccacacctggctaattttgtatttttaatagagatggggtttcaccatgttggttgggctggtctcaaactctaacctcaggtgatccacccaccttggcctcccaaagtgctgggattacaggcgtgagtcactgtgcctggctagccttgaacttctaagctcaagcaatctgcttgccttggcctcccaaagtgctgggattgcaagtgtgagccaccgcgtgtggcctctggctttttctttcttttttttctttttttgagacggagtcttgttctgtcaccaggctggagtgcagtggcacaatcttggctcactgaaatccccacctcccgggttcaagtgattcccctgcctcagcctcccaagtagctggactacagacgcgcgccaccatgcctagctaattttttgtattttagtagagatggggtttcaccatgttggccaggatggtctcgatcccctgacctcgtgatccgcccacctcggccttccaaagtgctgggattacaggcgtgagccaccacgcccggccgcctctggccttttctataacaacaatggcatcttcaatgatgtaatccttccggacttttatgatgttccatctattgggattctcttccacagcattgacaatctgttccataaagtaccatgtataatgaaacttaaaggtccttatgaccccctgatctagaggcagaatcagaaatactgtgtttgagggcaagtagaacacttagacaccttcagtatttaactcaatactgaagttctggggttctgggtggccaggggcattgtccatatcaaaagaactttgaaaggcagcctctcactggcaaggtattttgtgacttcagagacaaagcgtagatggaaccaatccagaaaaagtgttctcattatctaggccttcttgctgtacaatcaaaacactggcagctggtgttttttgtttcccttcaaagcttaggggtttgcaagtttaaagatagggcagtcctgatcataaacctggccgcatttacacaaaacagagttagcccatcccttcatgccttaaattctggtgctcatttctcttccttactaatatgtcctttgtggcaggttttttcccccccaagaatagggcacttttgtctgcattaaaatctgttcagggccgggcgcagtggctcacacctgtaatcccagcactttgggaggctgaggctggtggatcacctgaggtcaggagtttgagaccagcctggccagtatggcgaaaccccatctctactaaaaaatacaaaaattagccaggcgtggtggcgggtgcctataatcccagctacttgggaggttgaggcagaagaatcgcttgcacccgggaggcggaggttgcagtgggccaagaccgtgccatcgcactccagcctgggcaacaaaagcaaaactctgtctcaaaaaaaaaaaaaaaagatttaatactgcatctttacatttgtttacatttctctcaaccatgaatggtgccatgtatgatctataagtgtgtgcataaattttaactttttgtaatagatttgtgtatattttatgttagtaaatgataaaatagactaatgtctacatatagtttatacaatcatgacatacctttttccgaatgtttccaatagttctaggttacataatttgcgagtttttttcttttttcttttttttttttttttttttgagacagagtcttgctctgtcacccaggctggaatgcagtggcccgatctcagctcactgcaacttccacttcctgggttcaagtgattttcctgccttggcctcctgagtagctgggactacaggcacacgccaccacacctggctgattttttgtatttttagtagagataccatttcaacatgttggccaggctggtctcaaactcctgaactcaggtgacctggctgccttggcctcccaaagtgctgggattataggcatgagccatcctgccccgctgtgggttttttcatattgctacaaatctccggaagctttctgactgtgtgtggtggctcatgcctgtaatcccagcactttgggaggctggggtaggaggactgctcgagcccaggagtttgagaccagcctgggcaacatggtgagaccctgtctctacaaaaaatttttaaaaaatagccaggcctggtggtgcatgcctgtggtcccagttacttggaggctgaggtaggaaaatcacttgagctacagtaagccatgttcttgccactgcactccagcctgggtgacagagcaagaccctttcttaaaaaaaaaaaaatccaatttatgtattgaaaaaaaagccatgtataagtgaacctatacagttcaaacctgtgttggtcaagggtgtaaacatcacaaccttctctataatgtcaaaaaaactggaaacagcccaaatattcatcaatggggaaattaataaatgaattacgatttattcatataatgacatacagataaaaatgaactagaattattagcattaatacacacagaaaatcttcaaaaaaatgtaaaagagcaagatgcaaaaggatatatattaaaaatataccacttatgccaatattttaaaaagcaacactatagattctgtttatttatatatatgtatacatacatatacgtacacatatatatttagagacaggatctcattctagtgcccaggctagagtgcagtgatgtgatcatagctcactgcagcatagaactcctgggctcaagcaatcctctcacctcagcctcccaagtagctaggactacaggcgcatactgctacacctggctaatttttattttttagatttcttggagagacggggtctccatatttgcccaggctggtcttgaattcctggcctcaagtgattgtcccaaatcagccacccaaagcgctactacaggcatgagccagcacagccagcctataactaaagtataaaaacttggaggagaaacaaggtacactaactttagaactttgtttccttctgggaatggataaattattaaagagaactaaaggaggtttcaatatctctcatgttttgtttcttgagagatataaagaataaagcggggggaggcagcaagaaaaagggagagaaggagaaagtgtctgccatatggagtgacactacaggcaaatccaagttaaagagagcgtccgacaacttgtcaccttgacaatctggttgctggaacctgtcttctgtcaaactcaaaccttcagtagggtcctgcttaaagattccagtttggccactgctgagaactgagggaaacaccagtttatactctggctctacgcatagcaggaccttgccaaggcccggtaactgatggtaactggtggtggtggtggtggtggtagggtgtgtgtgtgtgtgtgtgtgggtacacacaggaggtggatggggatgagacagtgagctgccagggaaggtcaggagaaggatggtaaaaagggagatataacaggtgggggtaaaagacaatactttaaaagtagatgagggaggccgggcacggtggctcacatttgtaaaatcccagcactttaggaggctgaggcaggcggatcacgaggtcaggaattcaagaccagcctgaccaacatggtgaaacccgtctctactaaaaatacaaaaattagccaggcgcggaggcaagcgcctgtaatcccagctactcaggagggaggagaattgcttgaacccaggaggcggaggtttcagtgagccaagatcacaccgctgcactccagcctgggtgacagagtgacaatcagtctcaaaaaaaaaaaaaaaaaaaaagtagatgaaggaatagggcaaagttactactttgttgccatttcataatctggatgatattcaaaagtaaaattggctccttacaaaatttcaactttttagggatatctcagcccctaccatgccataatatgccctcaagtcatgtaacaacaaaagtatccaagagtcctaggccctgatcattgccctatttggagcagcccctagttgtcaatgtctcaaagttcttcattttcaaagtatgtgaatgtaaatatgcttagcagaataaaaaacaaaaagaaaggaagcactcacctccatggtgattggcatgcatatttttcgtgaccttgtgaatgaacagcttgaaaaaaactccatctgaagatgaatgtgcagagaccctggctaaggagctgattcagttgtcaggccactgcagggagtaacgtgctgttgctacctttttgtcttagtcaattatcatctgttttacaggctctctatccagttatctcatctcccaccccagcattctagagtgtgactacacaatgagcctgtgctcaaagagcacagtctaagggagcatctgataggctctggtcatagatctctcccatctctcccagcagtttctttgcttttccttttctttcttctttttttttgagacagggtctcgtcattgtctcctaggctggagtccagtggtgtgatcatagctcactgtaatcttgaactcctgggctcaaatgatcctcctacctcagccccccaagtagcttggagcacacatgcttgccatcatacccagctaatttttaaattttttgcagagatggggtctccctatattgcccaagctgatctcaaactcctgggctcaagtgatcttcctgccacagcctcccaaagtgctgggaatataggcatgagccaccattccccggctctcccagtacttactgattatttattacctccaaggctatgcacttcttgaacataatccctttattctccatgtttataaaacaacatgaaatcataaaggtccttgacatacttctctattctggactgtctctcccacctaatgaaagctgtagtcttaaacacaaggtctttttaaggtcaggcaggatggctcaggtctgtaatcctagcattctgggaagccaaggtgagagtatcacttgaggccaggagttcaagaccagtctgagcaacagagcaagaccccatctctacaaaaaatatatatattttctaattagccaggcacggtggcatgtgcctgtagtcccagctactcaggaggctgaagcgggaagattgcttcagcccaggagttcgaggttactgtgagctataatcacgtcactgcaccccagcctgggtgacaaagtaagaccctgtatcttttttttttttttttttttgagatggcgttttgctctttttgcccaggctggagtgcaatggtgcgatctcagcccaccacaacctccgcctcctgggttcaagcaattttcctgcctcagcctactgaggagctgggattacaggcatgcgccaccatgcctggctaattttgtattttttaatagagacagggttactccatgttggccaggctggtttcgaactcctgacctcaggtgatccacctgcctcggcctcctaaagtgctgggattacaggcgtgagccactgtgcccagctgagaccctgcatctttaaaaaaaaaaaaaaaaaagccttttaagaatgtaagagtttaagatattaccattatttaataaccaactttcacttttttcttgagccctctgacttcaataaatgtgttgtcactggaatgacacgatctgacttgtcccatatttctaaacttaactaaatcatgctaaatcactaaatcatgatcatttcatgcctgttactatttcttcctctttctggctagtctgaactagtttagttatatttgcatgacaacatactctgggaaatgtcaacttttttttttgagacggagtcttgctctgtggcccaggctggagtgcagtggcgtgatcttggttcactgcaagctccgcctcctgggttcacgccattctcctgcctcagcctcccaagtagcagggaccacaggtgcccgccactatgccggctaatttttttgtatttttagtagagatggggtttcaccgtgttagccaggatggtctcgatctcctgacctcatgatccgcccacctcggcctcccaaagtgctgggattacaggcgtgagcgaccgcgcccggccccaatatttttattagtatgaactgttattgtttccaataagcaggctactgtatgaggcctgggtatagtttttgttatacaagatttttgtttgtttgtttttgagacagagtttcactcctgtcacccaggctgcagtgcaaaggctcaatctcagctcactgcacactctgcctcccgggttcaagccattctcctgtctcagcctcccaaacagctgggattacaggcacctgccaccatgcccagctaatttttttttttttttgagatggagtttcgctcttgttgaccaggctggagtgcaatggtgcgatctcggctcacctcaacctccacctctcaggttcaagcaatcatcctgcctcagcctctcaagtagccgggattacaggcatgcacatgcctggctagttttgtattttcaatagagacggggtttctccatgctggtcaggctggtcttgaactcccgacctcaggtcatctgcccacctcagcctcccaaagtgctgggattacagttgtgagccaccagacctggcctaatttttgtatttttagtagagacagggtttcaccatgttggccaggctggtctcgaactcctgatctcaggtgatctacccgcagaattataagcaatctttatttttatgcttttctaagttttctaaatttgtttctgattatacacaaaataagtgttatttatctaaagcaatatatcatatacacatataaattacagcatctgtctcaatgctgtctctaatatacatatatgtatactacacgtgtatatatgtatatcatatacatgtatattagagagtgttgggacagatgctatagttatctgtaatatatctatatagtttacatgtatgtgtgtggatatatatacccacacacacatatatatatacatatatactcaacatagtgagaccctcgtctctaaatatatatatatgtaatatcctatctatctatctatctatctatctatctatctatctatatgtgtgtgtgtgtgtaatatatagagagaaagactggggtctcactatgttgcctaggctggtctcaaactcctgggctcaagcaatccgcttgcctcagcctcccaaagtgctgggactacaggcgcatgccatcgtgcccagctaattttttattttttaattttttgtagagaagggggtctccctatgttgctcaggctgttctcaaactcctgggctcacacaattctcctgcattagcctcccaaagctctgggattacaggcatgagccatagcacccagcctttctgtttgtatcagaacagaactaaaagttctatttcacaaggccggaacatgttactattttaaagctttacccaaagtatcaagaatttttgccagactatttttaagccttaatattaaaaagtgactcataattatatttctaaaactcaatttcatatctacaattatatatatgtatggaaaaaaaatctcaaatgacatatgccaaaatattaacactagtgaaatagcaggtgatttttatttatttactttttggtgttttctcatttattttgcaacaagtatgtaatcttttatattctaattttttctctttttttcctttttttctttgagatggagtctcactctgttgcccaggctggagtgcagtggcaggatctcagctcactgcagcctccgccttctggattcaagcaattctcctgcctcagcctcctgagtagctcggattacagacgcaaaccaccatgcctggctaatttttgtatttttagtagagatggggtttcactatgttggccaggctggtcttgaactcctgacctcgtgaactcctgacctcagcctcccaaagtgctgggattacaggcgttagccaccgcaccccactatattctaattttcttacttcggaggaggtgctgaatttgatgaaaattaatacttctacactttggggcaggagtatacatgtatacatatactatttctggagttcctcaccttgaattttactgtcaccctctctctaatgttttccttcttggtaaattatatcaaatattaacagtaatcaagctctactggttcaacctaggatccaaaccataactgaagttagatcaaattaaaaacaatccaacccaaacttgactgtcactatttattaaaaaataacgtaacttattgttttagaggaaaggagccattgcctacagtgaatgactgtatcagcactaggctgataatgttctatatacaaagtaccaaatagttattacaaacgagtttggaactgagattcagaaatctgtaactgtactatgagcctgacccttccaaggtgagtctcatctgttcttccaaggaacctcagctttaaggacaattaattccttacatttcatttcccctctggacatgtccaggtgggaaaaaatgggcaacggattcaggaagaatggggtttttcaatcccaaccactcaatggcaagttataaaacttaattcttaatttcctgactataaaacagaaacaagaaaaaccatcttggccaggtgtggtggctcatgcctgtaatcccagcactttgggaggctgaggtgggtgaatcatttgaggtcaggggttcgagaccatcctgaccaacatggtgaaaccccgtctctactaaaaattaaaaaaaattagccaggtgtggtggcgggctcctgtaatcccagctacttggaggctgaggcaggagaatcgcttgaatccaggaggcagaggctgcagtgagccagtatcaacgccactgcactccagcctgggcgactgagcaagactctgtctcaaaaaaaaaaaaaaagaaaagaaaagaaaagaaaagaaaaaaaacccatcttgtaatattgctctaagtattgaagatactgtatgtttagtaggtaccctacagtaggtactcaaattattataactggtttgcttataaatagttctttcttctgatgctaatgcttagagattccactgtacttaacataaaacgcatatttgaaaataactatttgctggggggtatacaggttggctgaatactggaagcaaggacgttgccagcaccctcctttactgctagtaccctctgggtctacttcatgtcacttctgttactgctatggcatctatcccaaaagtgggagggtcaggctgcccagcttataaggtttccagttccatgtacttatttcttactcccatgttttctttttcttatttatttattattatttttttgagacagagtcccactctgttgcccaggctgaagtgtggtggtgttagctcactgcaacttctgcctcccaggttcaagcaattctcccacctcagcctcctgagtagctgggattacaggcacgcaccatcacgtccagctaatttttgtatttttagtagagatggggtttcactgcgttggccaggctggtcttgaacacttgacctcaggtgatctgcccacctcagcctcccaaagtgctgagattacaggcatgagccactgtgtccggtccttagtcccatttctttcaggaccagtcaacagatagaagaggtagatggagaactgctggttcattttactgattttcaaactggcaacagaggtgatgcaaaagcagaccaggaagaacagtttcatttagaaaacactaatgagtcaagttgaattttgcatttccaaacataaacccaagagaaatctgcatattgtattcataacaatttagggaaagatttcttttagggaaagattttactgtcaagaaatctctcctccatctgcccttctcctatcttctctgcggtaaggtagcaaccctccatttgccacctatgacaaatgaggtttccaatatcatgtgaggaaaagagatcttaatcacaaagaaacagctctattcagtaacctacaatcataaaacaggtacctggcaggcaatttctgaacacgatagcaaatcagtttttttgtttgtttgtttgtttttgagatggagtcttactctatgacccaggctggagtgcagtagcacgatctcggctcactgaacctctgcctcctgagttcaagtgattctcctgcctcagcctcctgagtagctggcattacaagcatgcaccaccacgcttggctaatttttgtatttttagtaggatgagttttcaccatgttggccggtatggtctcaaactcctgacctcaagtgatctgtctgccttggcctctcaaagtgctggaattataggtatgagcccccatgccagtggccaacaattgcaaatcattttaagtgaacttgatccaatgaccaaacgaacattaaggactcattattagctataatgagagatccacttctacaagaccaccaccacaggaaaggaaacactgcagagatcctgtacagagcctccttcttgcttgtacagtccttacctgacagtcaaagtcctggaagtttcttgtaccattctgtcaacagaagacagaaaacacagtcagtttccccacatggtttccccacatgtgcagcacattcagttcacagtgacagcagtgcatgtgcagcctcttggttgccataaaactgaaatagttctcatcagaaggtttcagaggcagagtgggttatgaacatgtgttaataaaggccaaatcttcagaggtgagattatgctttagtgggcttatgagaagataaaggaaaggggcctagttttctagcaagcttgtaacttcttgccttcctacctaaggagagcggtgagaatttgcaggaagagggtaaaacatggaccacagtctggaagcacaccttgaacacacaagggaagtacctgggaggaaaggagttggagaccaaagctgagaaaggtgaaggagaacaggtgcagaaccaggaattaaataaaggatcaggaagaggacaaagatatggatggatcagaaatgaaagccttgaaatctaacagagaagaaaggcagtgttactgaaggagggaaagaaagacaaaacaaggttcttaatacactggcctatctgttgcatcctatgaaatcgctgatagggaaaaaggacaagtcattgaatcatttaaaaagtcaaacacagtcaaaaaatcgatggagaattcaccaagcttctaaaaagggattatattataataatgactgattgaggaaaaaaaaatcaatggcaataactcagaagcatttttccagcattccagatgccagaattgcaagtcataagagtataaaaaaggggccgagtgtggtggctcacacctgtaatcccagtattttgggaggctgaggcaggcagatcacctgaggtcaggagtttgtgggcagcctggccaacatggtgaaaccccgtctctactaaaaatacaaaaattagccgggtgttgtggtgtgcacctgtaatcccagctacttgggaggccgaggcaggagaattgcttgaaactggaaggcggaggttgcagtgagctgagatcgcaccactgtgctccagcctgggcaacagagtgagactccatttcaaaaaaaggaaaaaaaaaaaggtaacaagtgatgtatttgggaataaaagaaaacttctacttgatttttcacaaagtgtaacccccttcctgaaaaaagtctcccattatgtagaaactgatttatcacaactatttattctgtctctacaatgacttctagaaggttcctaacagcttcccaaaagctgcccctccagagatactccagatatctgatccccaaaaaatactgagtagtcccatctcccttcaagatgatcctcctagaaatagttcttcagggccgggcacggtgacttatgcctgtaatcctagcactttgggaggctgagggaagtggatcacccaaggtcaggagtttgagaccagcctggccaacatggtgaaacctcatctctactaaaaaactacaaaaattagccgggcatggaggcgcctgtaatcccagctacttgagaggctgaggcaagagaatcacttgaacccaggaggcagaggttgcggtgagccgatattgagccattgcgtgtcagcctgggtgtcagagcgagactccgtctcaaaaaaaaaaaaaaaaaaagaaaaagaaaaaaagaaatagttctttgggatcccaccaactacactgctggctggacaaaagagaggttaaaaagcacagcccaagccgggcgcggtggctcacgcctgtaatcccagcacggcactttgggaggccaaggcgggcggatcacctgaggttgggagtatgagaccagcctgaccaacatggagaaaccccatctctattaaaaatacaaaattagccaggtgtggtggtgcatgcctgtaatcccagctacttgggaggctgaggcaggagaattgcttgaaccagggaggcggaggttgcagtgagctgagatcatgccattgcactccagcctgggcaacaagagtgaaactgtctcaaaaaaattaaaaaataagtaaataactaaataaatcacagcccagtgtggtataaacacccaaagaaacaaactatccactccataagagggactatctagagctgcactatccagtacggtagccgttagccatatgtacaatttaagtttaaattcaataaaataaaatctcagtttctcagttacattagccatatctcaagtgctcatactcttgggcagtacagacacagaacatttccatgactgcagcaagttctactggacagcactgatctggaagccaaaagcttctgaaggaataacgttatgaaagagcagcccctgactttctaaaggtggcagtaaagtcacaacagattaccaatcatagagagactgcagatgccactgagaatgggcaagagaatggtagagacagtaaaatattattcctaacacgaaaccgaattcacaaaaagtctgatacagtcacagtatggaaagacaactaagatactgtgcagatgggactgggcagcacatttccaaggaatgttgctattgattaaaaggagcataatgttccatggctcctactagccctaagaaatgtctgaggacttcttcagagaaatcattgtgtttaatttacagatagactatgagaagcaaaagaaagggtcctctcatggattaggatagatggtttttgtaggatataaatggccagccagtgagtttctggttcctgattcaacttgtaccttcctccaaatatagcacagggcctggtgtaaatcaggtgcttgatacagatttataaaacaaataagccaatataaaaaaattaaatgttgaggaaattctgttaaaattttgggttaaaaaaaaaaacttctactgcattccagcttaagatatgtatggttagtaagagggaaaagaaagtaggatacaaaatagtctttacagtttgaccttggctacattaaaatatgcattaaaaaagactaaaaggccgggcacagtggctcatgcctataatcctatcactttgggaggctgaggcaggcagatcacttgagctcaggagttcaagaccagcctaggcaacatggcgaaatcccatctctataaaaaatgcaaaaaaaaattagctgagcgtggtagtgcatgcttatagtcccagctacttgaggggctgaggtgggaggatcacttgagcccaggaggtcaaggctgcagtgagccgagatcgcaccactgcactccagcctgggtgcaaagtgagatcctgtctcataaataaataaacaaataaaagacaaaaacattaacaatagcagctgcttctgcagagagaggttatgggtgattataattttcttcatattatgtacaatgagcatgtatttccctttctgaaattagaaaactagaaaaaaagggtctagaaaaccctaaaaaaatacccaatttagtattttgtaatataagatttaaagggccaggtgcgttggctcatgcctgtaatcccagcactttgggaagccgaggcggatagatcatgaggtcaggagttcaagataggattggccaatatggtgaaacactgtctctactaaaaatacaaaaattagctgggcatggtggcacgtgcctgtaatcccagctactcgggaggctgaggcaggagaactgcttgaaccgggacccgggtggcggaggttgcagtgagctgagatcgtgccactgcactccagcctgggctacagagtgagactccgtctcaaaaaaaaaaaaaaaaagtcagtcaggcatggtggagcgtgcctgtagtcccatctacttgggaggctcaggcaggagaatcacttgaacctgggaggtagaggttgcagtgggctgagacggcgccactgcactccagcctgggcaacagagcaagactccatctcaaaaaaataaataaataagggccaggcgtggtggctcacccgtataatcccagcactttgggagtccggggcgggtggatcacgaggtcaagagatcaagaccatcctgtgtaacacggtgaaaccccatctctactaaaaaaaaaaaaaaaaatagccgggcgtggtggcaggcgcctgtagtcccagctactcacgaggctgaggcagaatggtgtgaacccgggaggcggagcttgcagtgagcagagatcacgccactgcactccagcctgggcgacagtgcgagactccgtctcaaaaaaaaaataataataataaataaataaataaataaatacaaaaatgtaaagattgacctaaccttttaaggaatgatttataatgatgcctaaacagaccatattagggcttcaatctaacagaattcccaaaggttcctttagggattattttaagattagaaaaaatcactctagattgaattaaaatctcatagaatatagagccacaaattctgacgagctctttgggaagcagctgtcattgtatccatgaattctcccttcttacaatgatgtgaccatgaccatgaggcattctgtaaagccctcggtccctgacatgagcacaaaggggcatgccaaaagcagaaagccaatgccctcaagaacctcaagctatgtcttatttgttgagtaccgagcaaaaaacaactctgtgttctcaatcccatgttcctagctatactcccagataaaaggtaccaataactgagtgaagactatttagcacttgttttcctggctgtttttttgagacggagtctcgctttgtcgcccaggctgcagttgcagtggcacgatcttggctcactgcaagctccgcctcctgggttcacgccattctcctgcctcagcctcccaagcagctgggactataggcacccgccactgcgcccggctaattttttgtatttttagtagagacggggtttcaccatgttagccaggatggtctcgatctcctgacctcgtgatctgcccacctcggtctccaaagtgctgggattacaggggattacaggtgtgagccaccgcacctggttgtttttttgttttttttgttgttgtttttttttgagagcgatcccagaccctcttgaagaatggcttctagcttcatgagtaatcaccctggaaaatgggaatgactgggtctatttgacagtaactggctccagagtttctgaatggggatcattagctggtccttcactcaactgtgattaactgaggccatattatttattctctgtactcattaaaagttcagtactgctcattgggggcattctaaaaggctgagtaccttctggggcccttccctagagacttgtttctttttctttttctttttttttttttttttcctgagatagggtctcgctctgtcagccagcctggaatgcagtcgcatgatcacaactcactgcagcattgacctcccaggctcaaacgatcctcctgcttcagccacttgagtagctgggactactggcatgtgccaccatgcccggctatatatatatatatatatatatatatattttttttttttttttttttttttttgagacggagtcttgatctgctgcccaggctggagtgcagcggcataatctccattcactgcaacctccgcctgccaagttccatcgattctcctgccacagcctccagagtagctgggattacaggcacacgccaccataactggctcatttttgtagttttaatagggacagggtttcaccatgttgcccagggtggtctccaacttctgggctcaagcaatctgcccaccttggcctcccaaagtgttgagattacaggcgtgagccactgcacctgccctgtttctttttccttctgagacagagtcttgctttgtcacccaggctggagttgcagtggcatgatcatagctcagtgcagccttgacctctgggctcaagcaatcctcctgcctcagtttgtttgtctctgatgttcacagtatatggttccactctaacaaaacttctagaaatttcaggctatgggtgctttctttttttctgtccattttgaagatgccattaattccatattcagagaaattcttacactaagcagacttaagcagcagaaagggattcaaggaaaaaattaaaacaacagaataatttgaagaggaaaaaaatcaaggaaagccattaattattactgaaagttgcagtcaaagtagaagccagctaagaggaatgttttctgatggagcttagtggccatatgtaaaaggtaaataaagcaacccaagaaggtaaattaaagcaagcaagcctcacagttacaagcttagagaataagcaaaaagaaactaggaacgggtcaatgattaaagtgaattatgaaaaaaaaggggggtgtgaaaagcagaaatgtttcaaaaacaagtcattgctagggagaagagagatgtagtttcctaacatgagatctggtcaaaaggcatcaatagtttcaaaagacagaagcaacagacataatgtaaagaaagatgagatagttgaaagatgagatagataagaccttagaccaactatcaatagaaagagattttgggtgaatttacctgttctgtgaatttaaaggaaaggtccatttctgattcaccattctattcctggtcctgacacttaatgagtgcaataaacatcattttgtagaggttatgaacctctcaaaatagagatacttgatttgaggaagaaacgaataccaaagaggaaaggttacacgtaattgacatgctagggactaaagtggagaaaatgagttggtgcaatagtaaaagcttttagaaataagctgataaaaaactgttaaagagaataaaatatgactttgtattaaaaagccatacacaaaaaagataatccttccctacaaaaagtggaaacaaagatgggggattgtacaagcaagaagagttacatatgctcagaaaatactcagtttttctttaataataaagattcatataatcaactagtataataaatcggtgtattaaaatcatcagcagggccgtgcgcggtggctcatgcctgtaatcccagcactctgagaggctgaggcaggtggatcatgagatcaggagttcgagaccagcctgccaagagaccagcctggccaagatggtgaaaccccatctctactaaaaatacaaaaattagcagggcgtggtggtgggcacctataatcccagctactcgggaggctgaggcaggagaattgcttgaactggggaggcagaggttgcagtgagccgagaccacatcattgcactccagcctgggcaacagagcaagactccaactcaaaaaaaaaaaaaaaaatcttcagcaaatcattttcttcttttttttttttttttagacagagtttcgctcttgttgcccaggctggagtgcaatagcgcgatctcgactcagagcaacctccgcctcctgggttcaagccattctcctgcctcagcctccagagtagctgtggcatgtgccatcatgcctggctaattttgtttttttttgtttgtttgtttttttgagacggagtcttgctctgtcgcccaggctggagtgcagtggtgcaatctcggcttattgtaagctccacctcccaggttcacgccattctcctgcctcagcctcccaagtagctgggactacaggcacgtgccaccacgcccggctaattttttatttttagtagagacggagtttctccatgttggtaaggctggtctcgaactcccgacctcaggtgatccgcctgccttggcttcccaaagtgctgggattacaggcatgagccaccgcgccaggcccagcaaattgttttcaagtagaaatctgttcaaactgataatccagggataagaatgaaaatcctatatctgtgtgtgtgtgtgtgtgtgtgtgtatatatatatatatatatatatatatatatatatatatatatatatattatatttaagtatctatagcaatcattaccttcaaaatatactaagaaacagacttcataaagaaatttataaagaggttggatacttggataaaactatctacaatcagataatcctctgcagattgctgaaaaagtacaatttccactctaaaaatcccatgggcactctgctaaggtgtggctaagatgtggatctcttgcctcctgtaactggttgagggtcatctggtctgtaacggtggcatcactacctgcttcggaacccatttcttgctgcagtcccgtctagagcacttctgacaacagatgtaaccatcatgtcttagtacattaagggacacccactctagtccacactagatgtagcacttcatgaatattctttgatgaaaatgtcaataaatctatttttaattacagctgtttcttcttttctctctctccccctaggttttttttttttttaaacaaccttggagctgggtgcggtagctcatgcctataataccagcactttgggaggccgaggcaggaggattgcttgagctcaggagtttgagatcagcgtgggcaacaaagtgagacctcttctctacaaataacttaaaaattggccaggcatggtgggcacacctgtggtcccaactacttgggaggctaaggtagcctcccaagtaggtgggaattgcttgaacccaggtggtagagactgcagcaagccatggccatgccactgtactctaacctggatgacagagaccctgtctcaaataaaaaaaagatcctggggccaggcacagtggctcacgcctgtaatcccagcactttgggaggccgagatgggtggatggcttgagccccagagtttcaacatggcaaagctccgtctctaaaaaaatacaaaacgtagccaggcatggtggcaagagctactcaggaggctgaggcaggagaatcacttgagcccaggaggctgcaataagccatgattgtgccactggactccagcctgggcaacagagcaagcccttggcataaacgctttggctgtctctgttgtcctggaggttacaaaatgttgttcccagggttctccctcctctagttctaacaccctcctccctcctctgcttacatgttgtgattagtagaaaaggaaaacttaaactgcagtaagatttacctcactttcaggtgggtgcggtggctcatgcctgtaatcccagcactttgggaggccgaggcggacggatcacttgaagtcaggagttcaagaccagcctggccaacatggcaaaaccccatctctactaaaaatacaaaaactagctgaacatggtggcaggtacctataatcccagctacttgggaggctgaggcagaagaatcacttgaacctgggaggcagaggttgcagtgagccgagatcatgccactgcactccagcctgggcaacagagcgagactccatctcaaaaaaaaaaaaaaaaagatttacctcactttctactgtaacaaccaaaacaaagtatataacttttttctgttctctctactaaacatttattcccctttctgctatttcctcaattcttcagaagccaagtgtggccttctacttgttttctcaagcctcacctttggctttcacagggttcagtagtatctgaacctagtaggtagaggaaggcagggaaaatgaggcaaaacagtctactctcctgtttattacaaggtcttttgggtgaggagcctggaacaaccaggtacaagaggcagtagatggtgggaagaaccctagacccccaggtccaggtcaaagtcaaaagatgtaggttctagcctggcttcaccaacttaacagacactagctctgaacaaatcagataacctctcagtgtcatctgtaaaatagagttaaaatatcttcaactatttacaagagactggaagattaaaataagatattattggtgaaagtgctctgaaaatagttaaatgctattttaaaaatcatttcatatgcccatgcaatttctgtcccgcaaaacaaagtactggtggttgcttcttttcatcactagagccaaaacaagtatgacaaaattatccacttcttgacaattctgagccgtagacaaaattacaggcatactaaaataaaatgggaaaagtaccaacaaatgacaagagacaacataagccttgctcaaagctatattgagaatgcctccttacaagtcatctcaggacaaatttcacggtaaaaggttggttctagtcttcctttagcttcctgaagcctggaggatgcagcaatgtcttcagtatatttatgagaataatggacagaaggataaggtgaaatactacacatttttaggcttctccttaaagagacagggtaagccacaaaggtgatgccaaaacatctataggattaacacagtggaaacagctcaggttttaagagtaggaaagactttggtttctgtctggctttgccacttctttactgggcaaaccagcctttcattcggatttttaatctgtgaagtaggaataatactatctatctcaaagggatattctgagagagagaatgtatgtaaagcacttggcacataagagataataaatcatagcaggacaggcaaaaacaacaacaacaaaaccctcaagccatctacttctatgcaaatctgaaggcttttcctctataccagtggttcttaaccaaggaaattttgcctcccagggacatctggcaatgtctggagacatttttggttgtcaccactggggagtgctattagcatctagtgggtagaggccaaagatgctgctaaacattctacaatgcacagagcagtgttccacaacaaacaattatccaacccaaaacatcgacagtgagaaatcctgccatacagcaggcattctttgatactcaataggagtaagctacttcacctttcctagccttcgtttactcactggcaatgtgggaatacatttatctgtgctccttcctcatcaagctattgggaggttcaaatgaagtaatggatgagaggcattattatcattataccttttactatatacacaaaaccatccacttgctgcgcaaagacagaagcattcacatactggggagggggagagggaggctaacggggtggaagtctttgtttggaggtgccatgatctaaagagggcctcttgcctatctacctgcttggcgagagccaagagagttctcatgaatagtgatggcacaggagcacttacgtctcagggagagaaaggagtaaggtggaatgtgggaagtgggtaggaacagcataggcctatcaaagaggagcagatagatgttaggaagtgagacactgctttgtgtcttagtctactcgggctgtcataacaaaataacatagacttgatggcttaaaacaacagaaatttattttctcacagttctgaaggctgcaaagttcaagattaaggttctagaagggttcagtttctcatgattaatctcttcctggtttgtggacagctgccttcttgctgtgtccccatatggcaggggaagggagagagaaagagagcctctttctctatttatttattttctgagacagggtctcactctgttgcccaggctggagtgcagtggcacaatcacagctcactgcagcctcaacctcccaggctcaagtgatcctcgcagctcagcctcccaagtagctgggactacaggcatctgccaccacacctggatcatttttttaattttttggtagacaggatctccctttgttgcccaggctggtcttgaacttctggcttcaggtgatcctccagcatcagcctcccaaagtgcttggattataggtgtgagccaggttataggtgtgtgcctggctcagattttatttccttcctcctctcctaggcacaacatttttggcacagcccttcacatacacacatacacaaatggtacttaaaggagagagttttctggaaatatgaggggatgcagcaggagaaaccaaatggaggttaaaaaagcgtgcagtggccgggcgtggaagttcacgcctgtaatcccagcacttttggaggccgaggcgggtggatcaagaggtcaagagatcgagaccatcctggccaacatggtgaaaccccatctctagtcaaaatacaaaaattagctgggcatggtgttgcacacctgtagtcccagctacttgggaggctgaagcaggagaatcgcttgaacccgggaggcagaggttgcagtgagccaagatcacgccactgcactcgagcctggtgacagagcaagactccgtttcaaaaaaaaaaaaaaaaaaagcctgcagcttgccaagggagagagaagtctggtgaaagataaaagaaggggtgggagtgggaatggagaggtcacagggatgaaaataggggtggcaggattcaaaagcaaattagtaagcacaaaataagtcagcagctccagaggctgcaggtgaagggccttgccttgggcagataaaaagtaataagcaacagatcatcccctggtgtcacccgcacaccccccctccccgcccctccgcccatccatctttatcctcacactccgtcaacactccctcaggaaaggatggcatggcctcactcacacaaagctacaagagtatttcaagaggggacaatgacaatacaccaaaagaatagagtggaaaagaaggaatttcaagcagctgggcatggtggctcatgcctgtaatcccagcactttaggaggccaaggcaggtagatcacaaggtcaggagttcgagaccagcctgaccaacatggtgaaaccctgtctctactaaaaatacaaaaattagccaggtgcacgcctgtaatcccagccactccggaggctgaggcagaagaatcacttgaaaccgggaggcggagcttgcagtgagccgagattgtaccactgcactccagcctgggtgacagagtgagactccgtctcaaaaaaaaaaaaagaaggaatttcaggcacatttaccgaacaataaggaacaagagagaaaacaaaacttcttttcttttttttgagccagagttttgctctgtcgcccaggctggagtgcagtggcatgatctcggctcactgcatcctctgccttccgggttcaagtgattctcctgcctcagcctcctgagtagctgggactacaggcctgcaccaccacgcccagctaatttttgtatttttagtagagatggaatttcaccatgttggcgaggctgatctcaaactcctgacctcaagtgatccgtcagccttggcctcccaaagtgctgggattacaggcataagccactgcacctggccaaaacctttcttttggtaaatcatatcacaccagtgtctagtggtcatcaactgtggtctcatctgctccttgtgtagttctctgacactaacataaaaatgtggtatattactgacatccagtcctccctgatgtcatattgacagaaagaccacatcatagacttggcaaacttcagggagaacactgcagcctacgcacatcaccagccatggatggtaaattttccttattgaaactgaaagtcaagacacttggattctgagtcaaactccaccctcatacttcttttttcttttctttttttttttttttgagacagagtctcactgagtcacccagactggggtgcagtggcgcagtcttggctcactgcaacctccactccacctcctgggttctagcaattctcctgcctcagcctcccgagtagctgggattacaggtgtgtgccaccacacctagctaatttttctatttatagtagagacaaggtttcaccttgttgtccaggctggtctcaaactcctgacctcaagtgatccacctgccttggcctcccaaagtgctgggattacaggtgtgagccactgcgcccagccccaccctcatgctttctgcttaacattgccacattattttttcccttagcatctctatctgtaaaatacaaaaatctcaaagataacgtgattgaacgtggctcatggaaacaaaagtaggaagaaataaaaggggggaaacatcaaaaagatgcttaagaaatagattttttggcctggcacagtggctcacacctgtaatcccagtactttgggaggccatggcgggaggatcacgaggtcaggagatcgagaccatcctggccaacatgatgaaaccctgtctctactaaaaatacaaaaattagctgggcgtgatgacacgtgcctgtaatctcagctacttgggaggctgaggcaagagaattgcttgaaccagggagtcagaggttgcagtgagccgagattgcaccaccgcactccagcctggcaacagagtgagacaccgtctcaaaaaaaaaaagaaatagatttttaaagtattcctttcattgaaagtcaagctaaatatgttttaagttactatttagatgatacagaaaatgaaatactatcagaagaaaaggcttgtccatattttagtgaaaacagaaaagtctttaccttatcatttagaagtggtttgatctctgtgagctgaacatcctgaagttcatccatgaggtcagataacgagagtagaggaatctcaagaataaatcagtaactctgaaacagaaaagaaagaagtgaagaaaaaggcttaagccagaagttggaaacataatagtcacagtacacccattcattcaaatatgagacttactctgtgccatgccctgctcagggtgctaaagacacatagttacggcagatagacactaacctggtctataggattcttgcctcctggtattcacatccttgcctaatacccccagtgagtgtgcgcagggcctgtggcttgcttttaaccattagaatacggcaaaagtgatggaatgtacatgagtgactttgcatgattacattatataatattttcacatctgtcttgctgagggacactctcccctgctaggtctgaagaggcaagctgatgtgctgtgagagggccacgtaacaagtaactgagagcagcctccagcagaaagacagcaagaaactgagaccttcagttcaacaatctgcaaggaactgaatgctgccaacaacaggagcctggaagcagatccttccccagctgagtgtcagagaagaagctgaccgacaccttgatcgccatgttgcagaggacctacacagcccacaccagactcctgaaccacagaaactgagagacaatgaatatgtgttgttttaggctactacatttgcggtaatatttttatgcagcaacagattaatacaattaatacaatagtctttgctctcatggagcacacgttttagttactgaagacggataaagaaacaacatactcaaaactatgcttggaacagactggaagacggattaagcggggacaaaaattgaagattattactgcaggatgaggacttgaattaggaatggcagtgggaatgaaagaggagggaaccaaggctaagcttactaatcctcatttggggaatcacagcagtgggtgaaaggtatggtagtcagctccaagatggccttcaacgagcccagtgatccctgactcctgatattcattcacacatatgtataatcgcccacccaaataaatcagggatggctcgtgtaactaatagaatatggaggaagcaacaatatgtgacttctgaagctgcatcataaaacgcattacactttgtgcttcaagacactataaactactagttctaggggaagctagctgccaaatcatcaggacactcaaacagccctctggcgaggcccatgtggagaggaaccaacttgccagcaccaacctgctagccatgtgtgtgagttaccttgcaaatgaatcctccagccccagtcaagagttcggatagctacagccccagggacacctgactgcaaccacatgagagactctaagtcagaaccaccctaccaagcctgctcccaagtttctgacccacagaaaccatgagagataataattttgttttagagtgatctatagcaatagagaactaatacatagggagagcagaatggggagctcagagagaggagacaagttggagagaggtaggcagggtaatgaactacaaattcttcttctatctcaccatgcaagaagccatggggataggctgcaaatactcaatattgcaggaaagtgattcccacctagacttcaaagcttcaggcatcatcctttttgtcttggccctaaacctatcaagtcaggaaaaatgttaattcagagttggggatttacatttaacaaccatttattgagtacccattgcactatggaagatacaaaaagggtccctgcctctaaagagtagagatgatgttgatctacaaattgataaataaaaagaagggccataggaattcaaaggagaagcaattatgtctgattggtggaaatcaagaaagccttcaaaagatattagtctagtgtgtgtgtgtgtgtgtgtgtgtgtgtgtgtgtgtgtgtctggtgtttttgtttttttttttttgagacctagtcttgctctgtcacccaggctggagtgcagtggcacaatcgtggttcactggaacctccgcctcctgggctcaagcgattctcgtgcctcagtctcccgagaagctgggactatgggcacctgctaccatgcccagctaatttttgtatttttagtagagacagggtttcaccatgttagcccggctggtcttgaactcctgccttcaagtgatccacacacctcagcctcccaaagtgttaggatcacaggcgtgagccactgcgcccggcctagtgtactatattaatccacttttctgtttaccttctagagatagaatgacatgattttgatttaattacctatggagagggtatgtgttccaggctaccttttagctattatttgccaacacactgaaataaatcctgctcccagctatgcctatgttagaacagactaacaaaaaagccctcttatcatttattcaagggactcagaggatgtctattgagaacactcctcaggctatgaaccccacatgctaactgtgaatattccaaaagtgtgaaccacctagagaccacaaatttgatgatgtttaacctccctataggacagtggttcttttgtcagatcgcaggcacccatatacttgattgagctacttaatgcccagaagttgaatctttttttgtttttataccagtcacatttcaaaagggggtgaggtggcttgactcttaaacagtgagtttcagccagcatctacattctctttttcacagtccccacttaactcttaaaatattggcctaactggaatctactccatgtttgtttattaataacactacaaactgtggctactttttatttgaactttactatttatcagttattttaaatggcaatttaaaagcgttttccggccgggcccggtggctcgcacctgtaatcccagcactttgggaggcggagatggatggatcacctgaggtcaggagttcgagaccagcctggtcaacatggtgaaaccccatttctactaaaagtacaaagattagctgggtgtggtggcacacgcctgtaattccagctactccagcaggctgaggcacgagaatcatttgaacccaggaggcggaggttgcagtgagccaagatctgtcaactgtactccagcctgggcaacagaacaagactctgtctcaaaaatttaaaaacaaaacaaaacaaaaccagctttttcccttttataaaagcaatatgtgctcactttagaaaatatgaaaatcggccgggcgcagtggctcacgcctgtaatcccagcactttgggaggccgaggcaggtggatcatttgaggtcaggtgttcaagaccagcctggccaacatggagaaaccccatctctactaaaaataaaaaaaattagacaggtgtggtggtgcacgcctgtaatcccagctactcaggaggctgaggcaggagaattgcttgatccttggaggtggaggttgcagtaagctgagattgcgccaccgcactccagcctgggcgacagagtgagaccctgtctcaaaaaacagaaaagaagaaaatatggaaattggccgggaatggtggctcacgcctgtaatcccagcacgctgggaggccaaggtgggtggatcacctgaggttcgagaccagtctggacaacatggtgaaaccctgtctctactaacaatacaaaaattagctgggtgtggtggcaagctctgtaatctcagctactcgggaggctgaggcaggagaatcgcttgagcctgggaggcagaagttgcagtgagctgagatcgcaccactgcactccagcctgggtgacagaatgagactccgtctaaaaaaaaaaaaaaaaaagaaaaaaaagaaaatacagaaatcacagaataatgaacagataatttactcattgtccttccacctaaagaaaaccattttagcctatttccacttgtttttctttttcccacttaaatggtgatttcctgaaattgttttttcaactcacccactttatccctactttaattcactcactggaaagcaatgcacttcaagatgggaattattcaaatatgactccacatgggtgggcctgtcaaagggtcagagagaggcctaaggtgccctcaagtccaaagtgactggcattcacctagtgttccttttttttttttttttttttgagatggggtcttactctttcacctaggctggagtgcagtggcacaatcatggctctcaacctcccagcctcaagcaatcctcccaccccagcctctcacacagctgagacaatgggcatgtgccaccatgccttgctaacttaaaaaacattttttttagagacaggagtttcactatgttgtccagactactcttgaactcctagactcaagcaatccccctgccttggcttcccaaagtgcgggattacaggtgtgagccaccatacccatccctaagtatttttttaaagatgaagaaaaatgcaatttttacaccaacaaacacttaaacaaagacacaaattaaatgagaaggctgtccctatcagctaggcccaatgcaggctcaggcgacaatgttgtgcaggacagtaagctgctccagggtgactcaggatttggcaacttggcagtagacattcaccttccactattaggggatctaatgcattcttctggagactccatttttgctccgctttcaatgtctcaagcccttgccaatgagcagttttataacatatacaagaaaactaagattctggtggaaaactccatctccagatccctcagctgcacagacgggctccctcctggggatccaaggcctgcagttccggcatctgtacaaatggtatggctgccagatcccatacaggtactaaaagctattaatattttcaaaaggcaagtagggattttataaattgcagtcaataatttttgcctgtttcctagtcatatgagtaggagggaggattgataaggaaaaactagccatcttcaaattaaggaaatgaatctgataccaaatggctagaaagggaaaggagaaaaggtggctacctactctgtcaggaattataatctcggcaccttatgtttaatcctcataacaatcctctctggtagatatctttctttcttttttttttttttttcctgagacaagagtcttgctctgttgcccaggctggagcacagtggggcgatcttggctcactgcaacttccgcctcccaggttcaagtgattctcctgcctcagcctcccaagtagctgggactataggcgcatgcctccatgcccagctaatttttgtatttttcagtaaagacagggcttccctgttagcaaggctggtctcaaactcctgccctcaagtaatctgccagcttcagtctcccaaagtgctgggattacaagtgtgagccaccccgcccagcctagatatctttatttttttctctgagacagagttttactcatcacataggctggagtgcagtggcacgatctcagctcactgcaacctccgcctcttgggttcaagcgattctcctgcctcagcctcccgagtagctgggattacaggcatctgccaccaggaccggctaatttttatatttttagtagagacggggtttcaccatgttggccaggctggtctcgaactcttgacctcaggtaatccgcctgctttggcctcccaaagtggtgggattaccagcatgagccaccgcacccagcctttctttctttcttttttcttttcttttcttttttttttttgagacggagtctcgctctgtcgcccaggctggagtgcagtggcacatctcagctcactgcaagctccgcctcctgggttcacgccattctcctgcctcagcctcctgagtagctgggactacaggcgcccgccaccacgcccggctaattttttgtatttttagtagagacggagtttcaccgtgttagccaggatggtctcgatctcctgacctcgtgatctgccctcctcagcctcccaaagtgctgggattacaggcatgagccaccgtgcccggcctatttctttatagatgagaaatttaggctcagagaagttaagtaacttctaaaatccccacatctaagtaataaagagccaggagcggtagcatgcaactatagtgtcagctacttgaaaggctaatgcaggaggattgcttcagcccaagagtttgagtccagcctgggcaacacagcaagaccctgcctctaaataagtgaataatagggaaaggatttttttttttttgagatggagtctcgctgtgtcgcccagggtggagtgcagtggcacgatctcggctcactgcaaactccgcctcccaagttcacgccattctcctgcctcagcctcccgagtagctgggactacaggcacctgccacaacgcccggctaatttttttgtatttttagtagagacggggtttcactgttaaccaggatggtctcgatctcctgacctcgtgatctacctgcctcagcctcccaaagtgctgggattacaggcgtgagccactgcgcccagccagggaaaggattttaaaacctttgcttttcccattacaggttgagcatcccaaattaaaaaatctgaaatccaaaatgctccaatggatgcctggaagaagtgacaaaggacagatggatagacagatggatagatagatggatggatgggtggatggatacatggacacatacatacataaacaaactccagtgggcatctcccttgaacatcaagtctgtgctcaaaaagattggggttttggagcatttcagatttcacattttcagatttgggatgcttaaacgctagtaagtataatgcatattgcaaaatcagaaaaaatccaaaatctgaaacacatctggttcaaggcattttggtttttttgtttttttgggggggaggttttgagacagagtctcactctgtcgcccaggctggagtgcagtggctcaatcgcggctcactgcaacctccgcctcctgggctcaagcgattctcctgcctccatctcccaagtagctgggactataggtgccaccatgcccagctaagttttgtatttttagtagagacaaggtttcaccatgttggccaggctggtctcgaactcctgacctcaggtgatccgccgacctcagcctcccaaagcgctgggattacaggtgtaagccactgcttccaggctgttcaaggcattttggataagggatactcaactcatataccataatgtctgtgccaggccccatctactgattgtaggaccctgagcaagttttttcctctttacccagcctgtggcacctccttgaggtaagagaaggctaaagcaatcctatacataccaacgactcagacaccttagaaatgaagctctgagtcatcacaccaggacaagagccctcactatctcagtagttataacgctaagggcatagaggatgtggaatgagtagagaaaagagaaatgaagttccagctattacttggcaaacagtttcagaggcaagggctatttcttgcttgttagaacagcaagcctcaaaatctatcacctgggaatcttgtttaggatctcagatatgatcagttttaagtgatgagagtctaacatgtgacctcatcactgaggagagatggagataatctgaggtgaggagatgaactgaaagccttcattattattagcaacaatcttttttttttttgagacagagtttggctctgtcacccaggctagagtgcagtggcacaatctcggctacctgcaacctctgtcttccaggctcaagccattctcttacctcacccttccaagtagctgggaccacaggcacacgcaaccacgcctggctaatttttgtacgttttgtagtgtcagggttgcactttgttgcccaggctggtctctaactcctgagctcaagcgatccacccacgtcagcctcccaaagtgctagaattacaggcatgagccaccatgcccagccaattagcaacaatcttcaatagagatcagtgaggatggggtaaaggaagactccattaatttgatttcgtcctgccttcttccaaaatttcagtaaactagatggaacttttattttttatttttaaatgttttaggggccgggcacggtggctcacgcctgtaatcccagcactttaggaggccaaggcgggcagatcacctgaggtcaggagtttgagaccagcctggccaacgtggtgaaacctagtgtctaccaaaaatacaaaaattagccgggcatgatagcacgtgcctgtaatcccagctactcgggaggcagaagcaggagacgcgcttgaacctgggaggcagaggttgcagtgaggtgagattgtgccactgcactccagcccgggcgacagagcgagactctgtctccaaaaaaaaaaaaaaattgtttttttggagacagggtcttgctttgtcactcggctggagtgcagtggcaccatcttagctcactgtaaccttgaattccaatggtcaagcaatcctcccgcctcagcctcccaaagagctaaggactacagacatataccactatgcctggctaatttttgttttttggtagaaacaggtcttactatgttgcccaggctaagatgcgattttttaaagactcagcaggtccaatcaactaaaatgtgaacatactggagaaacaaaatagtttgcagaaacctcgctgaaaggtaacaagggtctgtcaggctcctgaaattacgaaatgtgaaaaaaataaaaaaaaaggagggggagctctgggatataaagttggtaaaaatagcacaaggttggccagggcacagtggctcatgcctataatcctagcactgtgggaggccgagatgggagaattatttgaggccaggagttcgagaccagcctggccaatatggtagaaccccgtcactattaaccaaacaaaaattagccaggcgtggtggtaattccagctacttgggaggctgaggcatgagaatcacttaaaactgggaggaggaggttggagtgagccaagatcgcgccactgcactccagcctgggcaacagagggagatgctgtctcgaaaaaaaaaaaaaaagaaagaaagaaaaaaagtagaacaaggtcagagaagagttagattttgccaaagttttcagttggggagataaaagaattatggaacaatgaatggaaattagtgagctgagaaaaagtaacagagaaactgatttgttaaaaagaaaatcaatttcagtcaggaatccaagagagacctgagcacaggtgggagtgagaatgagtgaggtaagcctccaaacgaccaccaaaccagagataaggaggtctgtaggcctgggctcttctgaaggacaactcagtgatggaaaagaaagaaccagtaagagacaaagaaaaaatgttcagagatgctagaggaaaggcagaaatacaatgtcaaagaattcaagggagaagagagatttacacaaaagtggaggaaaactgtcaaatgctgaagaaaaaaggaggaggatgaagactatgaaagggccattaactttggacagtaaaagtcagtggtgttaaaatctaggaaaaatgaagttcagttctccatgctgaaaagcccatgactatgtacatcactttttagaaatatagaaattaggccaggcgcgatgggtcacacccgtaatcccagcactttgggaggccgaggcgagtggatcacaaggtcaggagatcgagaccatcctggctaacatggtgaaaccctgtctctactaaaaaaatacaaaaaaattagctgggcatggtggcgggcacctgtagtcccagctactcgggaggctgaggcaggagaatggcatgaatccaggaggcagagcttgcagtgagccgagatcgcaccactgtgctccagcctgggcgacagagcaagactccatctcaaaaaaaaaaaaagaaagaaaagaaatatagaagttagttggcatagtggatcaaatccataatcccagcactttgggaggtgggaggatcacttgagtccaggagctcaagaccagcctgagcaacacagtgagaccccatctctacaaaaaattaaacaattagcagggtgtgatggtatgtgcctgtagtatcagccactcaggaggctgaggtgggaggatcacctaaacccaggaggctgaggctgcagcgagccacgactgcaccgctgcagtccagcctgggcaacagagtgagaccctgtctcaaactaaataaataaataatagaaatatagaatctaacatttctgaattgaaatgcaagcaaaaatgtcaccaggaatccaggagagacacacactgggaggggctttaaaagattaacaagatcagtgactttcaagttttacagcaaaactccgaaatagaaaacagaaaacatgtagaggctttggttgaagtggtggtgagaccactagggctctgcagaacaccgtttaaagcgtgataatacagagtgcaatcctttgttcactcagaaaaaagacacccagagacgcatggattcttccagtaatggaaagagcatgtaagcacatcagatgtggattctaaacctaaatgggcccctacatagctcagtggtgctgagcaaagcattttccctttctgggcctcagttaccccatctgtcaagggaaaagattgggcaggatgacctttttgagtccctgacagggctggaattctgtgatcctgaagctccctgtagaagtagtacttcacattcctccccaccagcatgagccttactacaatcctaagcatttccccaggtattagcctagtgagggtcaaccgcttgctggagatcactcagcaaataagcaggagggtacacttggcctgaccctggggacatgagggtctcagcttgtatctcattctgcactgtgtccatttagtcagatgaagctcactgagatttcaagcacttaaaaacattgctttggcgaggcaaggtggctcatgcctctaatctagcatttcgggaggccaaggagggtggattgcttgagcccaggagtttgagaccagcccgggcaacatggcaagaccctgtgtctataaaaaatacaaaaattagccgggtgtgatgacgtgtgcctgtagtcccagctagtcaggaggctgaggtgggaagactgcttgagcccagaaggtgaaggctacagcaagctgagattaaaccactgcactccagcctgggtgacggaacacgatcctgtctcaaaaaaaaaaaaaaaaaaaaaaaaaatatatatatatatatatatatatatatatatgcacatataaatttctttgttagtttaataaagacaataagaacaataagaaagttattggcttttgaaactgcaagctgtcttgttttacagctttttcccatgaccaagtttggcctttgtcaggccttgccaggatgtgctgacaccaggccgctagctagtattctaggggcggagtcaatcacctttgattttggcaagattgcagacagacaaccaaaacagaatgaaggtatggccgggcgcggtggctcacgcctgtaatcccagcactttgggaggccaaggcgggcggatcacgagggcaagagattgagaccatcctggccaacatggtgaaaccccgtctctactaaatatacaaaaaattagccgggagaggttgcaggtgcctgtagtccagctactcggcaggctgaggcagagcttgcagtgagccgagatcacgccactacactctagcctgggtgacagagcgagactccatctcaaaaaaaaaataaaaaaaaataaaaaacacacagaatgacggcaacaaacaaagggggcatactggagagaataatctggaaagggtcagctggagctggtgctgaagcagttatggttagaaagccacaggaagtggccacgggactggctgggaaggcagtcagcagagctcctaagcaaacagattcacatcctctctctttatacctttgaacagtggctatatgagtaatcattacagcactttccaatctacagagcaccttcacatttaacatctcactggattattatgatggcaccgtgagctaaaacactgaggcactggcatcatggctaccaacagacatgaagaaactgaggctgaaagaggtgacatgcctgggcacggtggctcacgcctgtaatcccagcactttgggaggccaaggcaggcggatcacctttgcagtgagctgagatcgtgccattgcactccagcctgagtgacagagcgagactccgtctcaaaaaaaaaaaaagaggtgacatggactgaccaaaataccacaactaataaatggcacagctggaactgaaacccaggtcttccgatcccaaatgctcattttatgccctaaatcacactttctcccaggtcatcacagatgaaaagactgagagtgaaaagaagagaaattcagaattgagaagactgcctcaccacacccactccgcactgaacatgtctttatctctgcttaagcagttaggattaggccacaggctctaggattaagccctgatatgtagtgaataacaagaaagcacagatgggggactggaattagtctttacctattaattcaattaaataggggagataaggtctataaacaaattgttacagttcgaggcagtatacatagaagcttatgaactggacaaactcaaaggcagtttctcaaccttggcacaactgacattttaggccagatgattttttgttgtgggaggtctgttctatgcattgcagaatgtgtagcagcatccctggcctccaatactagatgacagtggcacactcccccaacagctgtgacagccaaacatgtctccagataatgccaaatgtcctctttggggcaaaatcactcccaattgagaagcactgctctaagggttacagaggtttagggcataatcgagtcactgcagcttgtgggtgctgggaagaagtttcatggaggaggtaatatctgaactgcaccttgagaaatagataaaattcctgtaaatgagaataagaataaaagaggaaattccagaaagggaggataacttaaaggcaaggagatgagaaagcacaaggtctgctggaaataggaaataagggtaaaaatgacagctggaggctggtcatggatagctatccatcaactaatatttacaagatatacatacataatgacatagccaacaatacaccatatcacacgtttaacagtatacaagtcaccccagtggcacatgttgagcatctctaatctgaaaatccaaaatccgaagtgcttcaaaatccaaaactttttgagcactgacatgacgctcagactaaatgctcattggagcactcggattttagattttcagattagggatgctcaactggtaagtataattcaaatattccaaaattggaaaaaatccaaaacctgaaacacttctggtcccaagcattttggataagggatactcaacctgtatttccatgtgtcccactctctgaaggattgaatgctgcttgagttatcatgtttacattgcagctagtgtttggaacatacactcagagctaatgaagctcaaaaccaatgcagaggcaggagaaataactaaggattaggatggtcaggagtttcccaagggaagggagaatgatgggccctaaagggatatgttttgaacaggggaagggaggagggacatacaggtgaggacatcagggttgggaaagaaagaattaaagacaatacactcaggcagggcacctgtaatcccagcactttgggaggctgaggtgggaggatcacttgaggtcagaagttcaagatcagcctggccaacaaagtgaaaccccatttccactaataatacaaaaattagctgagcatgatggcgcatgccttaatcccagctcaggaggctgaggcttgaacccagggggtggaggttgcagtgagccgagattgcaccattgcactccagcctgggcagagcgaggccctgtctcaaaaaaaaaaaaaaaaaaaaaaagacaatacattcaggagacaccaagaacaatatagctgggaaagaagacaagctgcagaagtagcctaggtcagaatgcagagcacctgagctggactttactacacagacaacccctgaaggtttctgaggagcagaatgacacagaagcttaacttttttcagttgtttaaaacttggtcatgttgtccacgtagttatcttagctacacttaaacctgggaagcagtgaagattatcaatgactcagccccaaccttaaagatccaatttaattgggctaacgtagggcctgagtattgtttttaaagcttcacaggtaattcttacatgcagctagggctaagaaccactggtttacagtaatgccctcattctccaatgagaaaagaggcccagaaaatttaagtgatttctgaattcacacagccagctaggtgtggagctggaactagcatgcggattcctagctcagctctgaaagagatcccagagtactgggctaaattccatacttcagtctagaagatgcacaattatctgatgacttggctcttaagtttcctcagggttaaaggctgaattaatctaatcctaaaactattgacttaaacatcccctcaagtgtctacggtaatggatgttggttctactgctgtctcctgggggcccttaggaaagcaaaggatctcaggagactcccccaggaagccagataaacaagccaaaccacccagctccatggaagacttttaaaaatgcagctgagatttttcactgcataaaggaaagtctgggtacctcttcgccagaagaaattctctcagagatgctatcccccctatctccataagctaaggggtggggaaggatcaaaggcagctacttaagtagctgatatgctcacagatcctcactgtaacaggaagtacccctgctcatcctcaggcctagataagggccattcacacccctcatattttcctgaaaggaaaagggcagcaacccctgcaataggcccaccttcctgttgtgtcactcctgggttctggcagcaggtggtaaatgagaggtttgtagagactgccaagctggaaatctgagtctgtcttatatattaattctatcccttccagggtcctggtataaataactgctagaacaaagcaagacccatctaggagccttcttgttaatcccagacacccatcggccagcggaagttttaacacaggagtcatactaaagtaactctaaaagcagaagcacaaccccctgccttccactcctgaagaaggcaactcaggacacgaggaaagctaccaccagcaaagccctggggtgtgctcttagatggctccaggttcctgccagctgtaaggcggaatccctaaaaacaatttgtactttaaggcagcctgagtgaggtaaaggacaaacaagagccctaaaatgcagtatataatactcatacgagccaaatttattgagcgcttaacactatgccaggtaccgtgataagcactttatggattcattatttcattgtgcttcccaacatatttaatccaccccattttacagatgaagaaactgaagctcggacggggtattgtaatttgccaaaggtcacacagctagcaagcagcagagcaaggatttgaacctgagcaatctgcatcctgacctctataaccaattttccccacttgatgccatctgatcattaatccttctaatgcatattctcaggttaggttacgggagcttaccaggatgttactataaaataattctgaaaattggctgggcgcagtggctgatacctgtaataccagcactttgagaggctgaggtgggcggagtttgagaccagcctggccaacatggtgaaactcacctccaccaaaaatacaaaaaattcgccaggcatggtggcggtcacctgttgtctcagctactcaggaggctgaggcatgagaactgcttgaacctagggggtggaggttgcagtgagctgagattgtgccaccgcactccagcctggtgacagagcaagactctgtctcaaaaaaaaaaaaaaaattctaaaccccatacaaaatttaggtatcgttattatcattactactttaatatgagacttgtacctacctgggggtattggaaatgcaatacaacctgtggactaatcatccaaagttatattttagtgaacaccctggttaaaaccatcccaacaaaatgacttaaaagcaacactttctcctagcactttcggaggccaaggcaggagttcgagaccagcctggccaacatggtgaaaccccgtctctaataaaaatacaaaaattagccaggcatggtggcaggtacctataatcccagctacacgagagactgaggcaggagaattgcttgaatccgggggacagaggttgcagtgagccgagatcacaccacttcaccacttcactctagaccgggcaaaagagcaaaactcctttgcaaaaaaaaaaagcaacaccttcaaaagttaaaaaatggggctaggcatagtggctcacgcctgtaatcccaacactttgggaggccggggtgggcggatcacttgaggtgaggagtttgagacaagcctggccaacatggtgaaaccccatctctactaaaaatacaaaaattagtcaggtgtggtggcatgcacctgtaatcccagctactcgggaggctgaggcaggagaactgcttgaacctgggaggcagaggttgcagtgaactgagatcatgccactgcactccagcctggaccacagagtaaaaaactgtctcaaaaaaaaaaaaaaaaaggaaccagccagagtggctcatgcctgtaatcccagcactttgggaggccgaggcgggtggatcacctgaggtcaggagttcaagaccagtctggctaacatggtgaaaccccatctctactaaaaatacaaaaattagtcaggggtgatggcatgcacctgtaatcccagctacttcccagctactcaggaggctgaggcaggagaatggcttgaactcgggaggcagaggctgcagtaagccgaaatcctgccactgcactccagcctgggtgacaaaacgagaccccatctcaaaaaaaaaaaaaaaaaaaaaaaaaaaaaaaaggccaggcacagtggctcatgcctgtaatcccagcactttgggaggccgaggctggcggatcacgaggtcaggagatcgagaccagcctgaccaacatggtgaaacctcgtctctactaaaaatgcaaaaatgagccaggtgtggtggcatgggcctgtaatcctagctactcgggagcctgaggcaggaaaatcccatgaacctgggaggcggaggttgcagtgagccgggatcgccccactgcactccagcttgggcaacggagtgagactccgcctcaaaaaaaaagaaaaaaaaaaaaaagctgtcaacttgtatccatgaaagaaaattcagccttaaaaatatagaagcactgggccaggcacagtggctcacacctgtaatcccagcagtttgggagcctgaggtgggcggatcacgaggtcaggagatcctgaccatcctggctaacacagtgaaaccctgtctcggccgggcgccggtggctcacgcctataatcccagcactttgggaggctgaggtgggcggatcatgaggtcaggagatcgagaccatggtgaaaccccgtctctactaaaaatacaaaaaattagccgggtgcggtggcgggcgcctgtagtcccagctactcgggaggctgaggcaggagaatggcgtgaacctggtaggcggagcttgcagtgagctgagatcacaccactgcaccctagcctgggtgacagagcgagactccgtctcaaaaaaaaaaaaaaaaaaaaaaaccgtaaaccttacaatagaaaaacctaataagtaataaaattaagtataaagagtggctatatccagaattctacttgatcaattgaaaaccccagactgtagaccatgggcacttttaggtaataaggggattattgtcaaatgctatagctaaagcctggcggaaaccaccactgtacttagaaaattaatcttcatttactatattaaatctctagggaagataaaaagtggcatctccacacaaaaagactccatataacacattcttcccaaatccagggaggataccagctccatatcaataacattaattaatgtttgccactgcaattagtgtttataaagaattaaattcagaatgcaaagaagccggattcctccaaagtgcaccccagttggccatcaacaacaatttttttttgttttttgagacggagtctcgctctatcacccaggctggagtgcaatggtgtgatctcggctcaccacaacctctgcctcccgggttcaagcgattctcctgcctcggcctcccgagtagctgggactacagatgtgtgccaccatacccggctaatttttgcatttttagtagagacagtttgccatgttggccaggctagtctcgaactcctgacctcgtgatccgcccgcctcggactcctaaagtgctgggattacaggcgtgagccaccacacctgggcaacaaatttttatttacaactgataaaatgtcaaattctgtcatgtactatgagacatatcacagaactctgagtggactactagccctttcactgaagagataaaatcaaaagacataatactacccatttttgtataacatgcaaaacacccttcatatatcagttaatttcacatgaatgagagaacaattaattgtaggtaaatattatacattagttttatagaattagcactgtgatttttaaaaattcatttaccaaagaaggccctgaaacctggtaaatatccataatcaagctagctaagttttcgtgtgctattttcaagtgctattaaaaaagaaaggtggggggggaatcttttagaagaaacaatttgacatccagttctgcagtaaacccaaaatgttatcaatctttgcacttgaaagtactttttgatgcaccccttcctttcaccattcctatccaggcttgtccgttttcttccagaatctcccatttggcctttttttctttccttctgtcttcacttcttacccggatttgttcattcattcatcatttactaagcgcctattatcagccaagcacagagctagaccctggtccctgctcttaggaagcttacgtgataccaagtaaagctgctatctgcccatctcaatcaccatcaccagcctgcaagctttagcaaaggctttgtatttccagaagctagcagcatctggcatatagcagacactctaaaaatgtttgttggatgacactagattactttagcaagctctttttttaatccataaatattttactatatatcttcaaaaaagattcttatttttctttcatttttaaaacacaaaagcattatgtgcacaatgcaaaaataatatagaaaggtaaaaaagtaaattccccaagcctctaaatcttactcccagaagtgaggaccattagagcttggtatatatctttccagaactctcctatgtcagtatacccccacacctgactcacacgcacttttttgaaacaagttatttgacagtttctgactctagctgctcaaccttctaatcaagtggttctcaaagtgtgatccttagaccagcagcatcagcatcatctgggaacttgttagaactgcaaattctcggattccactccagaactaatgaatcagaaactctgaaggtcgagcccaggaatatgggttttaataagctctcaaggtaatgctggtgcacactaaagattgagaaccactgctctaagccagccaagccaatttttttactgtccgttaaacatggcaggcactgctatcttgtctgttttatcagccccgattcaaaatgttttcctgtccttttgattaattctgaccctatccacctgtcaaagcccagaaagtcaaaacccaaagtggtctcaccaccacatctcatactgatccttcttgccccctttccccagctcccatgatacagctagtccccctaccatataatttaacaattatatatacgctgacttcaacattagagaacagtgctttactcttccccaacagaccataacctccttgaagacatgaatcatgtttttgtatgtcttctcccacccctgttctaagcacataaatagaatcataatagagttgctagttaatgtctttaaggatgaattcactgagaagaaatactgataaacctttagtggctaaaaagtctggaatttcaagttgtagccagttctgcgaccttggacaagttcaattctcaaggtgccccccgccacctttctttcttaatagtgcttgaaaatagcacacaaaaacttagctagcttgattatggatatttaccaggtttcagggctttctttggtaaatgaatttttaaaaatcacagtgctaagtgagaaggatggacttaatgactcgatgctccatttcatcctgaataacatacaattttatgaaacaccccatgtaggaatatcttattccattatagtctaatattgctttgcttgtaacattaatatgggaatgtttagacttgattttagtacagttaaagacaatgtttcccaattagctagtaagttctctcaacaggaacctgtttgattcaactgtgaatcttccaccatatcaggcgccatacatccatgccttacccatagtcaatatatttacagaaaattatttggaaaaactctttaagaaccttcatttaaataaagaatctatgcacatatctgctgcctcccaaaggacctttttgaatatttattattataaataccatgtaatgatatacagtaaaaattgtgattactttgatacaaccaggggcaatcagccacagagggcaaaagaatgtaaaaatggatttctcatgcattgagggacagactaaaggggtataagcctcagactatcctactgcaacatgcaaatgaaaagtaccctgtacatcgaaatagcatataccaactccactgtaaacaggcatttttccctgctcagaagtaacaatttagaataaaacaaaagcagccgggctcggaggctcacgcctgtaatcccaccactttgggaggcagaggcaggcggatcacctgaggtcaggaattcaagaccagcttggccaacatggtgaaaatccgtctccactaaaaatacaaaaaatagctgggcatggtggcgggcgcctgtaattccagctacttgggtggctgaggcaggaaaatcgcttgaacccaggatgcggaggttgcagtgagccgagattgcgccactgcactccagcctgggcaacaagagcgaaactccgtctcaaaaaataataataataataataaaacaaaagcagctcggcctggcttggtggctcacgcctgtaatcccagcactatgggaggccgaggcaggcggatcacgaggtcaggaaatcgagaccatcctggctaacacggtgaaaccctgtctctactaaaaaaatacaaaaaaaattagctgggggtggtggcgagcacctgtagtcccagctgctcaggaggctgaggcaggagaatggcgtgaatctgggaggcggagcttgcagtgagccgagatggcgccactgtactccagcctgggcaacagagcgagactccgtctcaaaaaacaaacaaaaacaaacaaaaaacaaacaaaaaacaaaagcagctcaatcgtgagtgcacgttcaagtaacataaacaagctttttttttttttttttttttgagacggagctctgttgcccaggctggagtgcagtggcgcgatctcggctcactgcaagctccagctcccgggttcacgccattctcctgcctcagcctcccgagtagctgggactacaggcgcccaccaccacacgcggctaattttctgttattttttagtacagacggggtttccccgtattagccaggatggtctccatctcccgaactcgtgatccacccacctcggcctcccaaagtgctgggattacaggcgtgagccgcagcgcccggtccataaacaggctttttgatgcaagactcttatctgcaagttttcaaaaacaacagggtggatggaggcctttgagtggtaaatggtgatgacaagtttaatctgaaggaagagacaagcaaagagaaactgaagggcaggaaggaggaacagaagggcaccagaagaacaccacgctttgagtaatgaaaagggggggtggaaattaactgagtccttaccaaggatctactgtgagccaggcatctggagctgcaaagatggaccatgccctcaaggggctagaagtccgcagggtaagactgaggctaagaccctgttttgtgaacgtgtaattctaattgggaaaatcaagcagggaaggcttcacagagaaggtggtgatttagtggagcctttgaaatgtggaggaggatttgctaagggagaaaaacgacagtttgagctagttattttgggggagaaacattcacatatttttatagctgttcatttggaactttaaatcatgggaggcttcttaaattcagcaccactctatcaatgttctctttctcttcttgctttatcttaaatactgaaatgttcaagcccaaccttggggcaaaggcagaaagcctcggacagaaagccccggaatgaggtgagtgctagccaaatctgctctgtcacctccaagtccagcccgcccagctagcccagtcagcccagtcctgctctcttggcaggaaaggaaggctaataatatcccctgagggccagggtaagggggggggggggcgcggcgggggtgatctggatgccagcaggcaaggatcactcttgttctgtcagtaagccaccaaaggaaagcttccctgcttcctaatccacggggctcctagtctacctgtgatagggaggccagctctgcaggaagaaaaaaagggcttcatgacaaggaagggggaagcatttggattgggaagtgcagaggtggttatgcgaggttatcttaataaaatgcttagcaagatccctggcacacagcgagcggtggaagaacgttagctcttatattaataacactattattattacagtaacacctcaattgtactccgacaacaagaaaatcttttttgtgcagcctacttttacgacgttcgagagcaacttcagagatgacaagtgatttcaaaattttttcaaaggtacgagatcaaattccaaccgcactggcctgagagcccgagaccctgagttgagagctgaccctgccacttgtcagctgcgtgaccttgggcatggcacttcacctttccgtgcctcagtttcctcggctgttaagtggggctaagaagcctctccccggtagggtagtcgtagggtcccgttagaggatgccctctgctgctctggggccggacgggtgcaagggctgctcacggcccctcttccaagcatctgggctcttggagcgggcgaggtagatggatgagcaaccccaaggcccaccaagctctgccgcctgcagagccagagcgagagaagggttcgcgcctgcggggggcgtccctgtgacccagggtgttgagcccggagggaggctctcttgctacccacacgctgtcgccggcgggctgggcgcggggagcggccgaggaaagccgggctgacctgggtccggcgggcgggcggggcggggcagagggccccgggggcacgggggaggcaagcagcacgggccaccagggcctcgccgtgccgcggagatgatgcggggaaggagcagggcaaaggagcgacgcccccgaatgcggcgccgcgcgccccccgcgggccgggcggaggcgctcactcacctgaggcgcgggcacccgccgtcagtgcagcagcagcggcggcggcggcggcggcggcggcggcggcggcggcggcgagaggggcgggggaggtgctgcggtccgcgcaggcgcgccgaggacgccagggcggcgcatgagtgctgtgcccgtccacctcgggaactaccgagaagatggtggctgagccaggagaggccggcggcgccatctttgatgtagtttttcttgctgcggagtttcctcagagaagaatctcagattttggaggcgctgggcggcagggccattgagctctgcgtctggagcgcttccctcagttccctgagtcgcatccttatgaagcccctaagagctcttgcagggtatggcatcctccttttaaggtgacctagagccatacccaaggtcacagggcgcctagcacagtgctcggcacgtggaaagagcttagtaaatttttggtgaatgaacatagtaatttaagaactagagtccaagactcagggctccgaattaccagtcctccattgtatcacccctattacaaccgtcagccaaatcatctactttcttgaatgcaacattagagatggaattttttttcccagaatgattgcagatattaaacttaatgacccaacaatttaacaccaaaatgtacaggacacactcttcctctatttattatctattatttctttaccattaagtaccactgactaaaagtttttttgttttgttttgttttgttttttgagacggagtctcactctgtcgccaggctggagtgcactagcgcgatctcggctcactgcaacctctgcctcctgggttcaagcgattctcctgcctcagcctcccgagtagctggcactgtaggcgtgtgccaccgggcctggctaatttttctattattagtagagacgggttttcaccgtgttggccaggatggtctcgatctcttgacctcgtcatctgcccgcctcggcctcccaaagtgctgggattacaggtgtgtgagccaccacgcccttttaacccgagccagtgtcgccatctcggctcaggttcccaagtccctcagcctcccaagtagctgggactagaggcgggcgccaccatgcctgggtaatttttgtatttttttttttttagtagagatggggtttcaccatgttggccaagctggtctcaaactcctgacctcaagcaatccgcctgcttctgcgtcccaaagtgctgggattacaggtgtgagccaccacgcccggccactaaaagcatattcttttaattaaggcaaactgaacaaatgaatattaccaaacatctcagagggcagcaataatattgttattcatcaagcacaattcttgaactgaatttagttggaaggaaaactaacattaattgagcacagccatttattttatggtttatgttcgttaacatttactgaattcaaattagttctagttcaccatccactatttatccctatgtccttggttagacaattaagtctctccacacctctccatgcccgaattcctcatctatgtcacacacccagaaatagaagttacaaggttgtggcaaagactgaatgataatatgcatgtaaaatgcttagagctcagtaagtattatttttctttgttctatcgtattttactgttgaagacacaaaacatacttcttgagtttgaagaaatccttataagcaaaaaatgcaatacaatgtaataaataaaaagggggagggtataatcatctttagagagataatctgtccccattttacagatgaggaaattgaggataaaatgaaaattcatggccgggcgcagtggctcacgcctgtaatcccagaactttgggaggctgaggcgggcagatcatgaggtcaggaaatcgagaccatcctggctaacaaggtgaaaccccgtctctactaaaaatacaaaaattagctgggcgtagtggcgggtgcctgtaatcccagctactcgggaggctgaggcaggagaatggtgtgaacccgggaggcagagcttgcagtgagccgagattgcgctgctgcactccagcttgggcaacagagcgagactccgtctcaaaaaaaaaaaagaaaaaggaaaattcactccaactctctccattgtactactttgtttatgaaagagtaggcaattaagagcatttctctgattcttgagatacagatagagatagatatagacgagggtctcaccatgttgctcaggctggtctagaactcttggactcaagcaatcctcctgcctaggcctcccaaagttctgggattataggcatgagccactgtgtcccgctctgctctgattcttaaatgttggatttccatgagaccatccaaactttcccttcttgctctactgtggactatatcattcattctcaagtcatcaagaactagacatcagcaactctcaaatgttatttccagtctcgatttctccacccagttctccacctgtgttatttgacagaccagttgatttctccatttggtattccaaatagaacgagctttcccatctcaaattgctccatcatctacccactgttcaggcttcacctcctgcagcatactgataccgctaaacttttatattatttaattcttacagcatccctgtgatataggttctataattctctcaaccttcgagataagagattaaataaatttttcagtcacagttaataaatggcagagttaggggttttttctttttgagacagagtcttgctctgtcatccagactggaatgcagtggcacaatctcggctcactacaactttcaccccctcccgggttccagcaattctcccacctcagcctcctgagtagttgggattacaggcacctgccatcatgcttggctaatttttgtatttttgtagagatggggtttcaccatgttggccaggctggtcctgacctcaggtgacccacccacctcagcctcccaaagtgctgggattacaggcatgagccaccatgcctggctagagttaggtttttaacacctaggttacatgcctatgttctagccactgtgggcaacacgagcagtcccaccccactcatccactgccaacacccagcacaagctgtcatttctctcctagactcctgcaataacctaactggtctcccacacccataccttgctatcttttccccacaccacaactagagtactcttttaaaaataaagttctgatcttctcgccctttcttgaagccttctaatgactttcaattatacttgtctcaggccagtcttctactggtgcccagcactcctgctttattcttttttttttttttaagtgtcccagcatgctccactgtcctcctcaagcctttgaaaattgcttctccttttgcctgaaatacttgccccatttaactccttcatctttcccatgtcagctaaaatatctcttctgcagagttttctcttgttccttgtatcgtcagcaaactgagcatcatgagagagaacccatgtgtttttgctctttgctccctcctccaatcctagaactgtgtgtggcatatggcgggtactcggtaaatatataaaggaataaagaacaaatgtaggtccaagcaaggagatgtcatttctcattaactggcacttgcgccaaggtttaagacttaagattatgactgggtgtttaactgaaatgggatttgtccctttagtgggatcagagaataagaaacattttattttggctgagcacagtggctcacacttgtaatctcagcattttgggaggctgaggtgggtgtatatcttgagtccagtttgagaccagcctgggcaacatggagaaaccgcattcctacgaaagtacagaagttaggccaggcacggtggctcacgcctgtaatcccagcactttgggaggctaagttgggtggatcacctaaggtcaggagttcaagaccagcctggccaacatggtgaaaccccatctctactaaaaatacaaaaattagccaggtgtggtggtgcatgtgtggaatcccagctactcgcaaggctgaggcagaagaatcacttaaatccgggaggcagaggttgcagtgagccaaaatggcaccactgcactccagcctgggcaacagagggagactctgtctcaaacaaaacaaaacaaaaattagtcagatgtggtggtgcacacctgtagtcccagctgtttgggaggctgaggtggaagaattgcttgagctcaggaggttgagggtccagtgagccatgagcatgccatggcactactgcctggatttatttatttatttagcttgtttttgagccagggtcttgctgttgtctaggctggagtgcataggcacaatcatagctcgctgcagccttgaactcctgagctcaagggatcttcccgcctcagcctcctgagtagctgggactacaggcatgaggactacaggcacacaccatcaaattttaaaaaatttttaaattttttgtagggacaggggtctcaccatcttgcctaggctgatcttgaactcctagccccaagtgatctttccacttcagcctcccaaaatgctggattacaggtgtgagccaccatgcctggccagaataagaaacgtaagtaataaattagatggtgggtttttttgtgtgtgtgtggctttttttttttttttttttttaattttgagatagggtctcactctgttgctcaggctggaatgtagttctgtgatcatgtcttgctgcagccttggccttccgggctcaattgatcctctcacttcagcctcccaagtagctggaaatacaggtatgcaccaccactctcagctaatttttgtattttttgtagacagagttttggcatgctgcccatggctggcctcaaacttctgggctcaagcgaccactcacctcagcctcctgaagtgcctggcctagttggtgttctactgataattaatgcagaggtatatctcaacactactgttcacttcagcatcttggcaaagaatcctattttctgttaaaccctcctagtttttttggttttttttttttgagatggagtctcgccttttcgcccgggaaaaagcactgcccaggagtgcagtggcactatctcagctcaccacaagctctgcctcccgggttcaagtgattctcctgcctaaggctcccaaatagctgggattacaggtgtgtgccaccatacccggctatttttttatagatatgggttaccatgttggcgagggtggtctcgaactcctgacctcaagtgattcacctacctcggcctcccaaagtgctgggattacaggtgtgagccaccatgcccagccctccctcttttttttttttgagacagtctcactctgtcgcccaggctggagtacaagggcacgatctcggctcactgcaacctccgcctcccgggttcaagcaattctcctgcctcaccctcctatctggaactacaagtgcacaccgccacgcccggctaattttttgtatttttagtagagacagggtttcaccatgtttcccaagctggtcgtgaactcctgagctcaggcaatctgcccgccttggcctcccaaagtgctgggattataggtgtgagccaccgcacccggcactccctttttgtttatacactcaaaacatagatgaagacaagggaaagcttttaattatgtgcaattttataatacagattataaacaaatagaacaatgaatagtagtacttactcctttcttgtcatgaatccaggatttaggtcaactcaatatgaaaaactgaagcacactacagacaacaggacatagagaatgagtggtatttccttcaaattgaacatcttgtgaagtgacatatgtatcccaatgatgcaaataatgctcaaaactttttttttcatttttttacaatttttaattttttttaagacagtgtctcactctgtcgctcaggctggagtgcagtggcgcaattagaactcactgcagcctcaacctcctgggctcaaacaatcctcccacctcagccttctgagtagctagcactacaggcacacgccaccacacccagctaactttttgtattttttgtagacagggtttcaccttatttctcaggctggtcttcaacttctgggctcaagcaatccacccgcctcagtcacccaaaatgctaggattacaggcgtgagccattgcgcccagcctcaaaactcttctacctaaaatcaccttcagagccatgctagaaaattagtatcattcctttacaatcggaatccaacttggccactaaaatgtttccttagacttggtcctaaatgatttttggattgtttcaaaacctgaaaaacaccttcacaggataaagataaaagaatgggccactggatctgaagatcatttcaaaaaagaagtttgaactttcaagcattttgcacattcctgggaaaattgtctatacaatattcatttggatgtacaaattccatcactttttgaaaaaagtcaaagtgttctacagtcagtcctgccagttatcttcaaaggcaacgagcagaaatcacgcagtcaccacgtgctggggcactcttcccattcctctcctcttgggcaccttgtggcagaaactctcataaagtcactgacaagatccagatccagatccatgtatggcaggtgggttctgtagctgaagcttcaacagttttcgagctggtgagggatctaattgttgcatgcttctctttcctgcagagaaaagaggccaaaaaataaatttcaattgaaataacgtaacatttattgaaaacttaatgtagggacattgtgacacacatggaagggcattacaaagacaaataagagagtctctggcctcaaggagatgacaatttggtaagaatgccagccacagctgggcatggtggctcacgcctgtaatcccagcactttgggagaccaaggcgggacgattccttgagcccaggagtttgagactagcctgggcaacacagtaagaccttgtctctacaaaaaaaaaaaaaacaattagcctagcatggtcctagcacgatcctccaactacatgggaggcaagaggatcacctgggagcccagaaagttgaggctgcaatgagtcatgactgcgcccctgtattccaccctgggcaacagagcaagaccctgtctaaaaaaaaaaaaaaaaagggtggctcatgcctgtaatccctgtaatcccaacactttggaaagccaacatgggcagatcacttgcggtcagaagttcaagaccagcctgaccaacatggtgaaaccccatctctactaaaaatacaaaaattagccaggcatggtggcacatgcctgtaatcccagctactcaggcagctgaggtgggagaatatcttgaactccagaggcagaggttgcagtgagccaagatcatgccactgcactctagcctgggcaacagagcgagactgtctcaaaaaaaaaaaaaaaaaagaaaaagaaagaaagaaagaaagccagccaccactacaatcacaatacaatgtgatcaataagaagatggaggctgggagcagtggctcatgcctgtaatcccagcactttgggaggccaaggcaggtggatcacctgaagtcaggagttcgagaccagcctgaccaacatggagaaaccccgtctctactaaaaatataaaattagccgggcatggtggagcatgcctgtaatcccagctactcgggaggctgaggcagaagaatcccttgaacccgggaagcagaggttgcagtgagccgagatcgcaccattgcactctagcctgggcaacaagagtgaaactccgtctcaaaaaaaaaaacaaacaaaaaaacccaaaaaaacaagatggtcaggtgcagtggctcacacttgtaatcccagcactttgggaggctgaggcaggatgatcacttgagcccaggagttgaagaccagcctggacaaacagggggaccccatctctacaaaaaaattaaaaatttagctgggtgtggtggtggtggtgcatgcttttagtcccagctactctgggagcctgaggtgaaaggactgcttgagcctatcaggttgaggctgcagtgagctgtgcagtcattgtgccattcactccaacctggatgacaaagcgagagactttgcccccccagcccaaaaaaaaagtagaagaagaaagaaaatgaaggtatgtatagccaataatttagggctggaaggaggtcaggaaaagctagggaggagtaatgtcagtgtcacttagtgaattcttgagaaatgaagagggaaaaagcaatgggtgggtatttcttaagtcttggatttaccaaaacaacaacatatttcatggggatttaattctcagtctactgtgcttctgtagaatttacatctagaaatttcctatcaactctgagtacccataacatactatttattgtggggagaaaaacaaatcacctcatataggtcttaccctcttggaccataggctttgaagggcagtttgtatcccaaaggctatcatggaaaacagcctgaactctggtcccctcaagagacaagcttaccgagctgtactgacaccttctggaagcactgggtactttcatccataaaggcctgcagctgtttcactgatccttgcagttcatccatctgtagaaaaaagacagctgtgagctgtaaaggtccatggcttcttggatgttcctcaaacctgacaagcaagctcttgctcaggagctctgggcttgctgttctttcagcctggaatgcttatgccagataattctgtttgttcctccaaagtcacaccacattcttctccaggctgctctatgctccaggaggctgacccatgtaacctctaccaacaggatgcctaagtgggaaggagctgaacgagtcatcttgagttggctcaactcagctaaccatgtgactttctcccattagatgccacagtaactgctactccctcctccctttgagtcctaggaggagtaagagctctactgcctataagccccaggttactccactaacccttgtggttctccaatacccatacctttctatttagcctttctgaaaataaactctccttgaattgtcctttcaaatgccatctgcttgctattaatacctggtttgacacaacactactccctcaaacgtcctcatggctcatttccttcaagtctgttgaaatggcacctcagaggagccttcaataaccttgctatataaaatagcaacccaccaacctccctatactgtctgtctctcttaccctgcttcatcagcatttaccactatatattcatttgtttattattttttaattgtctctccatgttttcctaaggtagagttgaatatacatattcaacttacacttatacatttctccaggtcttttaatttccaaggattacaaggtggcaaagctggataactcaactaaataaacatgagcccacttaccaccaactccatacagtcaaagactttgctctggttctgtaatattttctggtagtcaggttttgtattaagaacttcattctgagaagacccaagatatgtcataggttccactttgacctcagtaattttggcctcagttgatcctctaaaaacaaaacacaagagcttttgagagattctgtaattattttctggaagagataccaaagattatcctataaagctgaatcagtattcctccactctacgctagctataggctcacttcttaacagaaaggtttttttttgtttgtttgtttgtttttgagatggagtctcactctgttgcccaggatggagtgcagtggtgcggtctcaggtctcggctcactgcaacctctgcctcccgggttcaagcaattttcctgcctcagcctcctgagtagctgggatttcaggcacctgccaccatgcccagctaattttttgtatttttagtagagacgaggtttcaccatgttggccaggctggtctcgaactcctgaacttgtgatctgcccgcttcggcctcccaaagtgctggaattacaggcgtgagccaccgcgcctggccttaacaagaagttctgaaacaattgtctagtattcatgtctttatacctccggactccaggaaatgctggaagcttccagtcagttgaatccacttaatagtaaggtccatataccagaaggactatacttgggagagagtgaagccaaagcttactatcctaaagtcagtgtctataattgtttaccaaaacatgctggcctacttcaattatctaaaataactgaacaggactgagagttcatgaaaactgatgaacaacaactttaataacaacaactactacaatttactgagtgctaagtatatgccagatattactgggcactttacatttaacctaatttgacacaataacccaatgaggaaggtactaatatcatccccattttcaaatgaggaacctcaggctcattcaagactaagtgacttgcccaaggtcacaaaactaaggaacagttagagtctgaacagacagtctgcttccagaaccattcctcttaacctacaagctttgccacaaaagattttatctgaaactagcatcttacacattatctatcttcataaatacagtatgtaaggggtgaataaagtaactgataaccatcattacctggattggggaaatttttcaaaccatgctcctcaaagcccctctctactgagaggccacttttgtaattagggttttgactaacattttgtagttgggattctagctgattctatctcaaaaaaaagcttaaaaccatggtttaaatgttcaactaaatcaaaatctagcattttctggccaggtgctgtggcttacacctgtaatctcaacacattgggaggccaagatgggcagatcacttgaggccaggagttcacgaccagcctggccaacatggcaaaaccctgtctctactaaaaatacaaaaattagtggggtgtggtggagcatgcctgtaatcccagctactcgggaggctgaggcaggagaatcgcctgaactagggagttggaggctgcagtgagccgagatcgtgccactgcattccagcctgggcgacagagcaaaaaaacaaacaaaaaaacaacaaaaaaacacccagcccagcctggccaacatggtgaaatcctgtctctactaaaaatacaaaaattagccacgcatcatggcagacacctgtagtcccagctactcaggaggctgaggcaggaaaattgcttgaacccgggaggcagagtgagctcagatggcgccatgcactccagccttggcaacagagcgagagtctgtctccaaaacaaaacaaaacaaaacaaaacaacacctagcactttcctacttttcctctaccttcaagacccaaagatcctctctttcctcaatcttcctcatcacccactttcatgtctttctgtctccaagaaggccctggccaagggcatcccccaaacctgcagctcataggccatgtgctcactgaagccccttggttactgttcttggcccaaccccaggctgccagatacaatgcagagatgtgtctgtctcccccaggatatgaaatgttagccaaggacacagaacagaaacaattgtgttcttggactgaaaatagtgacaccaactcttccttcctctcactcacttcccgtttctggtcagagagtgctaatacacactacagaatttgatgagcttattggcccgtgagaaaggattcatctttcaatttgtgctaacagaactgaaataaacaccaatcaaactccataagatttttaaagagtttttacagttcatagatctaacctggacaatatctctttagcctcctgctggtagtgaagcaagagctgatcccaagtctgacgttctaaagaaaacctgtaagaatcaggaaaaaaagttcagttaatttttataatcttattctgaatcactcacagtaacaataagtatgtgaggtgtacaatctggatgtaaaatgtgagttgacaggtcattacagggttagaaagcctgaccaattcagagaatatttaatcatatcaaacctgagttcttcaagtcaaattaatatttgtattctctagactccattctatgaaattgatcattagtagagtccataaaaatctcaatatgcagccttctaacttctagtattgatgcactaatgctgactctccaaatacaatgcttactattcattttttccaagttagttaatttccccagatgggagaacgaatttagattttctaacaaaggttaacttactttgttatgtattccttcatctcagccacagatgcttccaaagaaaaatctgatgcttttctggaaaacagataggattatgacataaatctttcaagaaatatttgctttaatataatcgcttataaattagttatttatttatttcagacggagtttccctcttgttgcccaggctggagtgcaatggcacaatcttggctctctgcaacctctgcctccctggttcaacagattctcctgccttagcctccagagtagctggaattataggcatgtgccaccacgcccggctaattttgtattttcagtagaggtggggtttctccatgttggtcaggctggtctcaaactcccgacctcaggtgatccgcccgcctcaacctcccaaagtgctgggattacaggcatgagcaacagcacccagctatttatttatttttgagacggagtctcgctttgtcacccaggctggagtacagtggcataatctcggcttgctgcaacctctgcctcccgggttcaagtgattttcctgcctcagcctccagagtagccgggactacaagtgcccatgaccatccctagctaatttttgtatttttagtagagacggggtttcactatgttggccaggctggtctcaaactcctgacctcatgatccatccacctcagcctcccaaagtgctgggattacaggcgtgagccaccacacccagccttttatttatttacttttagtagagatggagtctcgccatgttgcccaggtctcaaactcctgggctcaagtgatcctcccaccttggtctcccaaaatgctcagattacaggtgggagccaccatgcccagaatcccttacataatttttgtctttcaaaaaatacttaatgttggactctatttcacttttccactaggtaataactttctttttttttgagatggagtctcactctgtcacccaggctggagtgcagtggcgcaatcttggctcactgcaagcttcacctcctaggtttatgccattctcctgcctcagcctcccgagtagctgggactacaggcgcccgccaccacacccggctgattttttgtatttttagtagagacggggtttcactgtgttagccaggatggtttcgatctcctgacctcgtgatccgcccgcctcggcctcccaaactgctgggattacaagcatgagccactgtgccgggcttgcactaggtaatagctttctaagctgtaggtaataaatagctaggtaatagctttctaagtggtctctttatattctgtttctcttatcaattccaattcacatcatggccagattaacctttcttaaaatatttctctaatttctttttctcgttgcttaaaaactctgtgactctcagccaggcgtggtggctcacgaccgtaatcccagcagtctaggagaccgaggcaggcggattacctgaggtcaggagttgaagaccagcctggccaacatggtgaaaccccgtctctactaaaaatacaaaaattagccaggcatggtggcacacacctgtaatcccagctactagggaggctgaggcaggagaattgcttgagcccaggaggtggaggttgcagtgagctgagatcgtgccactgcactccagcctggccaacagagcgagactctgcctcaaaaaaaaacaaaaacaaaaacaaaaaaacaactctgtgactctctactgcatacagaagaaaagtcaaaactccttaacctggcacttaaggctctctgtgttctggtaccgtccagcttaccaactttgattcctactgttacccaatggcttaaatgagtggggtaattaattcttatgaaaaagaagcaggcctgaaaatgccaaaatattttatatgtacttggtattctacctcgcaaaaacaaattatttgtgccaccattcaggtttttttctagaaaagcctgagacacacagccattaccacctctggctaagaaacactagcctgtgctaaaatatactgcattaaaaataggcccggtgtggtggttcacgcctctaatcctagcactttgggaggccaggaagggtggatcacctgaggttaggagttcgagaccagtctagacaatacggtgaaaccctgcctctactaaaaatacaaaaattagttgggcgtggtggcaggtgcctgtaatcctagctactcgggttaggctgaggcaggagaatcacttgaacttgggaggcagaggttgcagtgagtagagattgcgccattacactccagcctgggtgacgagagcaaaattccatctcaaaaaacaaacaaaaaaagagatgctactttaaactaaaatgtttttcatttcctgtctagcaatgtcaatcctaaagacctttgtgaagtcaaaacctaaagttcatgatgtaagcccaagtgaagtgacttgttgctgggtggaaattagggtgttaaggatgttagtctcacccctacagaggaagtaccagttttgggggtagttttaaatttctgctaatattcaagagccatgttctttggctcttggcaaggtagcaaagatgtgaattatgtttttcccctcatcttttcatggctggttccttctcaccattcatatcttacaggtttcaagcccaaggtcaaatcattagaggtctctgaacactccagctaaagttgcccaccccctcaagtcatgattatatttactgacctagattatcgctgagtcattatttcccatatatttgtttattgtgtcttctattataatgtatgacaaaagagaccttgcttcacttgtcattatatcaccagcatctaaaagagcctggtacataagacgctgaatccgctgggtgtgggggctcatggctgtaatcccagcactttgggaggcagaggcaggaggatcgcttgagcccaggagttctaaaggcctcagtaacatagggagaccccgcctttaaaattaaaaataggccggcgcggtggctcatgcctgtaatcccagcactttgggaggctgaggcaggcagatcacctgaggttaggagttcaagaccaacctggccaacatggtgaaacttcatctctagaaaaatacaaaaaataagaacaggcaggatggctcacacctataatctcagcactttgggaggctaagtagggcgaattacttgaggtcaggagctcgagaccagcctggccagcatggtgaaacccccatctcccccatccctactaaaaatacaaaaaaattagccaggcatggtggcgcatgcctgtagtcccagctacctgggaggctgaggcaggagactggtttgaacccgggagatggaggttgcagtaagccaagattgcaccattgcactccagcctggggtacagagcaagactccgaatcaaaaaataaataaataaataaaaagagaagatgctgaataaatgtttgttggtgaatgaacaactatctaattacaacaaaagtcctaattcttttttttttttttttttttttgtgagacagagtctctctctgtcacccaggctggagtgcaggggcgcgatcttggctcattgcaagctccgcataccgggttcatgccattctcctgcctcagcctcccgagtagttgggactacaggcgcctgccaccacgcctggctaattttttatttttatttttagtagagatggggtttcaccgtgttagccaggatggccttgatctcctgacctcgtaatccgcccacctcggcctcccaaagtgctgggattacaggcctgagccaccaacgcccggcctaaagtcctaattcaatcataatttaggacagaaggggaactgctcttacccatttgaatcttcaaaacatttttgtagagttccatcagtttccagtccgtctgcaaaatgtttcaattcttcagaaagagaagatgctagacagcacaaatttacgtgtcataaaataaaggaaatatacgttttcatagtgagatgctgacaaaggtatattaaggtagtctcagctctaggtactgttacatgttggtcctcaagcccacccaaaagtgtggagttaagtatgtagaaagattttatcttttttttctggtaggtatagataaaatgaaagacaactcatttttatctatttatttagacagactctcgctccgtcacctaggctggagtgcagtggtgtgatctcagctcactgcaacctccacctcctgggctcaagcaatataacccccgcctcagcctccctatttgctgggaatataggcagcaccaccatgcccagctaaattttgtattttctgtggaaatggggttttaccatgttgtctaggctggtctccagttccttggctccagcgattcgcctgcctcagcttcccaaagtcctgggattgtaggcgtaagccactgtgcccagcctttatgacatttatgataaatgtttctataaatgaactgtgaaaaagcagtttaaaaggtatatctgaggctgggcggggtggctcacacctgcaatcccagcactttgggaggccaaggcaggcatatcacttgaggtcaggagtttgagaccagccaggccaacatgatgaaaccctgtctctactaaaaatacaaaaatatacctgggcgtggtggtacacgcctgtaatcccggctactcgggaggctgaggcaggggaatcgcttgaacctgagaggcagaggttgcagtgagctgagacggtgccactgcacaccagcccgggcaagaatgagactctgtctcaaaaaaagaaaaaaaaaaaaaaaaaaaaaaagaagtcaggcaataggcaagagggtaataagaaacacggaggcaaataaaaaattatgggcatagccgggcatagtgcttgtagttccagctacttaggaggattgcttgagcccagcacagcttgagcaacatagtgaaaccccatctctttattagaaaaaaagaaaaccaggctgggcgcagtggctcatgcctataatcccagcactttgggaggccaaggcgggcagatcacgaggtcaagagatcaacaccatcctggccaacatggtgaaaccccatctctactaaaaatacaaaaattagctgggcgtggttgcgcatgcctgttgtcccagctactcaggaggctgaggcaggagaatcacttgaacctgggaggcggaggttgcagtgagccgagattgcaccactgcactccagcctggcaacagagcaaaactctgtctcaaaaaaaaaaaaaaaaaaaaaaaaaagaaagacagaaaaccaaaaaggccaggcatagtgcctcactgctataatcccagaactttgggatgctgaggtgagagtttcacttgagcccaggagttcaagaccagcctgagcaacacagcaagaccccatgtctacaaaaaaattttttttagaaagttagctgggtgtggtggcacatgcctatagttccagctacttgggaggctgaggaaggagaaatgcttgagcctaggagatcaaggctacagttaactgtgatcatgccagtgtactccagcctgggcaacagagcgagatcctgtctcaaaaaaaaaaaaaaattatgggcgtaaggttaaaaacaggcctctgctagacttgaagagtccactactacattcaggtgaagaacactaaggggaaaggctatgttaattagttatcaggataatcctagcatatctactttaattaaggtgatggtacaattctgagataaacaattttaactggcaagtaagcccaagttcatgtattttctagatcttttaagtgggtaaacttgagtatttctgaccctggataagtgtatatttacactattagcagaataggtacttcctagaaagttcaatcattagtattttatttcacagacaactagctaactgcctcgtaatatgaagagttcctaccaatcaatgtaaaagagccaccatcctaagttttaaaaacgaacatgaggctgagccatggtggctcgcgcctataatcccaacactttgggaagctgaggtgggtgaatcacctgaggtcaagagtttgagaccagcctggccaacatggcgaaaccctgtctctactagaaatacaaaattagccaggcatggtggtgcatgcctgtaatcccagctactccagaggctgaggcagaagactcgcttgaacccaggaggtggaggttgcagtgagccaagatcgcaccactgtactccaccctaggagacagagtgagactccatctcaaaaaaaaaaaaagaaagaaagtacaaatggctctaaaaatatgaaaaaagaaaaaatgcttatcttcttcaaaagaaaaaggaacacagattaaaactacaaaatatcttctatcacctatcatatagtaagaaaatctaaaaggcttttttattggtgagagtgtaagaaaacaagtccctacatgtattgctggtgagagaataaattgataccacttgtctgggaagcaatctggtaattcccataatttcatttgaactagttaattccaattctaagaatttatcttctttttacttgcatacgtgccaaaaggcttgtgttaaaaaaaaaaaaaaaaaaaaaaaaaaggccagatgcagtggctcatgcctgtaatcccagcactttgggaggccaaggtgggcggatcacctgaggtcgggagttcgagaccagcctgaccaacatggagaaaccccgtctctactaaaaatacaaaattagcccggcgtggtggcacatgcctgaaatcccagctactagggaggctgaggcaggagaattgcttgagcctgggaggcagaggttgcagtgagccaagattgcaccactgcactccagcctgggcaacaaggtggctcacgcctgtaatcctagcactttggaaggcggaggcaggcggatcatgaggtcaggagatcgagaccatggtgaaaccccggctctacaaaaaatacaaaaaattagccgggcgcagtggccgacgcctgtagtcccagctattcgggaggctgaggcaggagaatggcatgaacccgggaggcggagcttgcagtgagccgagatcccgccactacactccagcctgggcgacagagcgagagtctgtctcaaaaaaaaaaaaaaattcattacattatttactgtagtagcaaaagactaaaaaaaaaaaaaaaaacaaaaaacaacacttaaagcctattagtaaagaactagttaaatccaggccgggcacagtggcttgtacctgtaatcccagcactttaggaggccaaggcgggcggatcacctaaggtcaggaattagaaaccagcctggccaacatggcgaaaccccgtctctactaagtatacaaaaaattagctgagcgtggtggtgggtgtctgtaatcccagctactcaggaggctgaggcaggagaatcgcttgaacccaggaggcagaggatgcagtgagccaagactgtgccactgtattccagcctgggtgacagagccgcgactccatctcaaaaaaaaaaaaaaaaaagaaaaaaaaagcaataaatatttctgcaaggatacacaagaaactggtggccatagctacctttggggagaggaacttagactgggggccagaatggaagggaagattattttccactttcacacttccttagcttcataagcatgtattcttgcaatttaaaaaaagtagggggctgggcacagtggctcatgcctgtaatcccagcactttgggaggccaaggtgggcagatcactgaggtcaggagttcaagatcagcctggccaacatggtgaaacctcttccctactaaaaatacaaaaattagccaggtgtggtggctcccagctactcggggggctcaggcaggagaattggttgaacccaggaggcagaggctgcagtgagccaagatcaccctactgcactccagtctgggcaagagtgagactctgtctaaaaaacaaaaggtgggggagctagttttataagggagcagcttctgtaaatggggatgctgtgagcaaagctttgactgcccagggtcaaagctcactcatctgttagcaacttacctttggctctaaaactttcaagactgaagcccttagtgtcccttaggaaaggttcaagtttctgaatagagaactaaataaagaaaagcatttttagtacaaccaccaaaaacttccaggccagtcctaaatttatgtcattttatgatgtttaataaatatgaaactaaatactaaatatgatgtaatttttacacataagacttttcacagaaacaaataaatagataagggaaaaaaaaaaaactctttgttgaccaggcacagtggcttacgtctgtaatcccagcactttgggaggctgagacaggcggataataaggtcaggagatggagaccatcctggccaacatggtgaaaccccatctctactaaaaatacaaaaaaaattagcggggcatggtggcgcgtgcctgtagtcccagctactcgggaggctgaggcggtagaatcgcttgaacctgggaggcggaggttgcagtgagccgagattgtgccactgcactccagcctggtgacagagcaagactccgtctcaaaaaaacaacaaaaaacaaacaaagaaaaaacaaaagactttttgttgcttggactacagattttgactttcggttcaggaaaaaaaaaaggttatttaattcacacaaattacctgcttatctaaattgatgtaagcacctggtagccacataatacacaatacaccttaaaaaaaggctgggcacggtggctcacacctgtaatcctagcactttgggaggccaaggtgggtggactgcctgagctcaggcattcaagaccagcctgggcaacatggtgaaaccccgtctcaactaaaatgcaaaaaattaagggctggatgcggtggctcatgcctgtaatcccagcactttgggaggccgaggcaggcggatcaggaggtcaggagatcgagacaattctggcagacatggtgaaaccctgtctctactaaaagtacaaaaattagcggggcgtggtggcatgtgcctgtagtctcagctactcgggaggctgaggcaggagaatcacttgaacctgggaggcggaggttgcagtgagtcaagatcataccactgcactccagcctgggtgacagagtcaggctccatctaaaaacaaaagattgtcacaatagcagttaacaaacacaaaaacatttcctagttataagaaccttacctggaaactggaaagcaggagacagccaagccgtttgctttctgctaaatcgacactgatagaccggctgagctctaacataaaacatagccacatttaaggagctggatagttacatagttagcaactaacaaaactgaaaaatgtcctccctcttgataaatccaacttaaggcaagaacagccttctttagttaaagacagaattctaatttttgcaggatcactgaggaatgaagtttacccatttgttcatctaaacttaaaaaaaaaaaagttataagaatctttgtattgggcaggtacgatgctcatgcctatagtcccaacactctggggccgaggcatgggatcacttgagaccacgagctggagactagtctggacaacatggtgaaatcccgtctctactaaaaacagaaaaattagccaggagtggtggcatgcgcctgtaatcccagctactccagaggctgaggcatgagaatcaaaagggctcaggaggcggaggctgcagtgagccaagaggttgcagtagctgagattacaggcatgcgccaccacacccaggtaattttttgtatttttagtagagacagggtttccccatgttggccaggctggtcttgaactcctggcctcaagtgatctgcctgccttggccttccaaagtgctgggattacaggtgggagccactgtgcctggccacatctgagcttttttataggacaggcactgcaatgtgctttaaacactctgtactgtatactataagaagagtactattataaagttccattttacaaatgggaaaactgcagctctgaggggaaatgacttgcttgaggccagaaactggaaatcggtggagccagaattcaaacccaagtctctcaccgatatctgtgtttttccctctattaccacactgcctctctataatgacctcataatagcattaataactaacatttgttgaacacttgctatataaaaagcattttatgaaatgctatatacgtatttcattaaaccttgaggcaagtatcctatgaattccattcagataacagataatgacacaggcacaaagtaataggtcacttgcccaaggtcatagagtgagttattagactgaattgggtgagcattttacataattatgcaactgaatccctaaccaatcgcaagatgtagataccgttttttaaaattatgtccacttgtaaacaattactacatagcaaaggaattttgctttgtgaattatgagagctacatgtctttttgccctctagcttcagctggttgtgtttttaaagttcttgtctcttaattgtcactgctgttagtcaagaaaaacaggatactttctgcctataaccaaggaaacctgacaggttgccagaaataaccaggcaagaaccaatcttattacactgatgcttttctgtttaagtctaaatactccggcatagagctaaaggtagggctaatcttgggatgcactgatgttttctcagcacatttagggactaaagtacatgggccttgtggcagcaattttctgatgtgctaagtgcctatctttacccagatttccttctgtgcatcagaccacttggaaataggacgataccttaaaactaatcacagtagcttaacatttcagggcttactatgtcccaagtactgtgttatgtaagataggtactatttcatctccaagttgctgatgaggaccttaagacaaagaaggttaagtaatttactcaacatcacagagctagtatagtcttcctgaaatatgcaagcttttccacgttatgttctgtactttgatgctaagatatagttactattgtaaattcacacaaaatgacacaaatcacgttctgtatagcatccctaaaaactgtttttcactgtagatacacacacacacacacacacacacacacacacacacacagagagagagagacagagagagaaagaaagtgaggcgggggtgggtggggtgcagggagggaagagggaagggagaggggtggggtgcagggagggaggagggaagagagaggggatagggaaaaagagacaaagttttttagagacaggggtcttactttgtcacccaggatagattgagtggcgcaatcatagctcactgccttcttgaattcctgggcccaagtgatcctcttgcctcagcctctctccagtagctgggactacaggtacgtgccaccatgccctgctatttttttaaaaactttttgtagagatggggttttgccatcttgcctaggttgtcctcaaactcctggactcaagcaatcctcctgcctcccaaagtgctgggattataggcatgaggcaccgtgcctggcccactctagatatttgtatgtgcatcttccctctgaggtatttccagttataaaggctaaaatcaggtatcaacccaactatcttctgctccactttagggtatgagacagaaaaccacagaaagaaatctttaatgtttctcaccctagcagaggtgagtattgaacaattagaaatttatttgtggcagctaataatataatataagtagtaagccaggtgcagtggctcacgcctgtagtcccagctacttgggaggctgaagtgggaggattgcttgagcccagaagttcaagtccagcctagacaaaacagcaacatcctgtctcttaaaaagaaatagcagtaatactgaacatttactaggtgtttgacatcagtacttataaagtagcaagtcatgtctattctcccacactttctgccatacctcactgcctcttatctgagctggaacctgtctcttatctgagctggaacctcactgtcttgtgtacacagcaccccacctgtgatgccctggtgaatgggatgcagcgacttccgccggttcgtttctttcatacttgctcgccgccaggattgcctcctgtcttgataactggcagattgttcttgaggagacaaatgaagggacttcgactgaagtctttcctggtggctgagatcacaatttcccccttttttagggctagagccaaggtgaattctttcctctgaaacgccttgattcatctccagggaggcagatgttttagcaaacacttccacaggactgagacttgattccaattgatgatcatgagtcttagacatcactggtcctttttctagtatttgttataaaaaagtcaaaatacaagatcaagcccgccacaactatttgtgcaaaaaagtggaaaaagtaaatgtatgcccctagatcgtggaaacataaagaaagcatctctgcaaataatgagtatgtgattccaaatctaccaggagccaggaaagatttgggtatagctcagaagcctgaacccaaggtaagaggtactgaatttcactacaatacttaccatctatgatctctgatctagtcactgaagtcatcctaggtggtaaactctgaaaataggaaaatggaagtgatctgttcttcacgtttcactgcagtctcaatggggctttacagccccagaataaataggccgtgtgctttccagcctctctgagctacccttatccacctccctgacagagaatatcagcaggggccatcacctcctcttctgaatttctatacactttattgctagaaatattcaaatctccctgaacacataccctaccttacttcccagttactttgtgtttaactagtccctaattccattgatgacattatggtctacctggtcttccaaactagaaaaaccacatcatccattacttcttattcttagttctccagatccaaagtcctaactgttttataaacagtctctaaatcttttctccattctcactgttactagtttatttattattttgagacagggtcttgctctgttgcccaggctggagtacagtagcacaatcttggctcactgcaacctcctcctccccagttcaggtgattctcctgcctcagcctcctgagtagctgggattacaggaatgcaccaccatacctggctaatttttgcatttttagtagagatggggtttccccatgttggccaggctggtctcaaactcctggcctcaagtgatccaccagcctaggcctcccaaagtctgggattacaggcgtgagccaccacgcccagcctcactgttactagtttagttcaggtctcataatttctggtccctcccactatcttaatagtctctccactagtttttctacctccaacggcccgtctccagtctattctttgtttttgtttttttttgaggtggaatctcactctgtcgccaaggctggagtgcagtggcgcagtctcggctcactgcaactttcacctcccaggttcaagcaattctcctgcctcagcttcctgagtagctgggattacaggtgcctgccaccacacctggctaatttttgtatttttagtagcgatggggtttccccatattggccaggctggtctcgaactcttgacctcaggtgatccgcccggcctcagcctcccaaagtgctgggattacaggcctgagccaccacacccggcccagtctattcttcagacagttgccgggacttttccaaagtgtagtcaacacctcaggtaaactagtcccaatttacccattcctgctctctcctcccagtcctattccctgtactacttctgaatctttgcacatatctgtccttctacctgttaaacttattcatccttcccaacctggctcaaatatgaagctttcacatcacttatctttggcagagttggtggttatgccccttggccttcgtagcattggctataaaatctgtttacatgtctgtctccccagccaggctgtatttgtattcctagtgactgtcaggaacaactgcctggaaggcagggatgtcacctaggcatctcttcatcgtcccctccctcccagcagaaatctgtctgtggggggtgctaagtaaaaagatatgaatatatgcagagggacaaaaaggaaaagataacaaggagggctcggtcaaggatctgaatcccccacggtccttatgacaatatcacacaaatccaggcttggataataacgactgtatcacacagatccaggcttagaaaagcaacaactgtcaactgttaaacgcttattctgtgctaggacctgtgctatgtaagcgctttacttgcatcgttattccacttaatcccttccacaactccgtaagcaccattaactccactttgcagacaggggaactgaggttcagaggggcaaaaagcctggcccaagcttgtgacacagccagcctgggggcacaggggcaattcgaaccccagccctctacccagtcctcacccctgtttctggagcctagacccctggcacggcagatacgtctctaatggggtcggtaagggggactgccctcgggtttcatttcacccgggaggaggtcgcagcgccctcggggacccccagtgtccacggtcggggccggggctgcggcgggtcgagctgggccgacgggtacgacgccgaagagattagtgcggcggcgggcggggccacatcagaggacaagtctgtgacttcctgacgcccgtccagtccggaacctccgtacctgaaacacaaggccacgggtcgctctccacagccccaggtcactcctggacgccttgcgcacccgcagccgatactccctgatcagggtgaagcggtctccaccttctacgtcacggtcaccgcctccgaaactcccgccaaccaagggcgcatgcgcggccgtcagtttctcgggcacgcgcgcgcagaacgcctgcctccggcgatgcacatgcgtacaccgccgcccgacgcgcatgcgtacaccgccgtccaacgctcctgccagctccgctcctctagtccaagtcctttaggtcctgtctggccacgtcaccacctccccgcaacaccccgcccgggagtccctttccgggacccgccacactatcgtgtccttttgcgcccgacggccccagagcccatctaagatgggggaaacagaggcccggagagattcttgccggaggaatacagcgcctcaaagggcatctgatgccctgtccccgtcgctaggctctggttcccactccctttatctccttaactcccaaaatgtggaccgtgactctccccagggtggactggagctctgagctcagtttgcctcacagtctatcccactcctgctctaggactttttctctctcatttccaggccactccctcaaacggcttgctttacttgcttggtgggtgggggcctgccctcgggtttcatttcacccgggaggaggtcgcagcgcccccaagtggtcgcagtgtccttagtcggggtcggggggtgcggcaggtcgggctggtccttaggggtaggacggggacagggcatcagatgccctttgaggcgctatattcccaggcgctgttccctctgcctgggaaggctttccctgcttttcctagctacatcctccaatttttttgtattttgagacggagtctcgctctgtcgcccaggctagagtgcagtggcgcgatctcggctcccggcaacctccgcctcccgggttcgggttcaagcgattctcctgcctcagcctcccgagtagctgggattacaggcgcccaccaccacgcctggctaatttttgtatttttagtagagacggccactaaaaatgttggccaggctggtcgcgaactcctgacctcaagtgatccacccacttcggcctcccaaagagctgggattacaggcatgagccactgcgcccggccacatcctcgaattttaagcctcagctaaggaatgattgatttctctccaagcattctctctggccttaggctgaaaaccaactgtcctttctgtgctcccaggagcccaatctgttcctgctccactatcccatgctggtctaggaggctccagagagcgggctgcttcctcagcacccagcacgacgccaccaaaatgtccccttggatgtgcacagtcctttctttcacagaaaaacttccaaatattgaattataagcagcccacagtccaaaagaggggttggagagaggcagctggagctgaccgtggtcatccttccatagcagttgtggtccttggaaaagttttctggtgggagacaaaaatctgccttcctgaaatttccaccctgtggttccagcctgctggctgcagcagccattctgaaagcagagatttgcccttggctccctgaatatcactttctggggttgagaggtacccagttccttttatgcttgcctgcctcttaaactcctctctgtcaacgtgccaggaagagaactcagtgttccttcccagctagggctggccatcctggggcacaatgagaaaatgatttcatggaatacagacccaatacatcttctacatcgtttccctgctttgaattgttgcatggctccctcctgtccacaggaggcacacatttttttcccctataaggcactgtgtcattaggctgggtgtggtggctcacgcctctaatcccagcagtttgggaggctgaggcctgcggatcagttgaggtcaggagtttgagaccagcctggccaacatagcaaaaccctgtctctactaaaaatacaaaaattagccaggtgtggtggtatgcacctataatccctgttacttgagaggctgaagcaggagaatcacttgaacctgggaggccaggagaatcacttgaacctgggaggccagggctgcggtgagctaagaacatgccactgtactccagtctgggcaacagagcaagatttcatctcaaaaaaaaaaaaaaaaaagaaaaaagaaaagaaaaggaaaaagaaaaaaggcactgtgtgatctgacccagcctcttctttcagttccccagttctgctctgctctctttctacgaggctttcacacatggtattccctctccctggaaccacttcccctcagtcccgtgcctacaacacaccaccatggccttcatctggtcaacatctcaatcttaggtgtcattcagatgtcctttcctctgtgaagcctttcttgtttcctctgggctggctgagcaccctgggctccccctgccattaacatttgatttcatatcttccaggcccatccattgtatcctcaatacctagcacatgcctggctgttattagcccctcatagaagagatctatgaagtatcatgtagccagcttctaagatggcccccaatgacccctggttcctggtgttcatgccctcgtgttgtcccctcccatgctgaagaatgctagtctatataaccaattagatattgcagacattatagacattatagtctgtggcttttttttttttttttgagacggagttttgctcttgttgcccaggctggagtgcaatggcgcgatcttggttcacagcaacctctgcctcctgagttcaagcgattctcctgcctcagcctcccgagtagctgggattacatgcatgcaccaccacacccagctaactgtgtatttttagtagagatggggtttctctatgttggtcaggctgatctccaactcccgacctcaggtgatctgcccgcctcggcctcccaaagtgctgggattacaggcatgagccaccgcgcctggcctagtctgtgagtttcaaggcttagctataaaagacattgtgacttcctccctgctctctcatagatcacatgctgtggaggaagccagacgccatgttgtgaaggcacgcaaacagcctacagaggtccacatggtgaggaactgaggcctcctgcaaacagctagcaatgacttgccaggcataagtagctactttgcaaatgggtcttccagctcatcaggcattcaaatgactgtagcctgactgacaactgactgcaacctcctgagaccttgaatcagaactgcccagctcccaaattcctgacccatagcatctgtggggtataataaatgtttcggaataattaattacgcttcaatagacaattgacacacacctaaaagtgtctttttttttttcataaaattgttaaagtcttttgtagaaaagttcaattctatttttcttctttttgaagactgcatttgtttctcagtggtcatatcacactgtgtgggagacgctgaagtatcagcaggcagcagccagaacacctggtggcccctcccaagtgactccaaaccagccagctggctgtggcctccctgggctccccacttcccaggcagctgggagtggggaaaagttaggtttcagatccgctggggcccccacccacctcattagaaaaatcagagaggaggccaagtccacagcagctgttcatatgacatactttatttccaatctacaaccattaaaaacgctttataagtttacactgtacagttattctcatgtctgaaataagacacaggggcagggagagctggtggattggactgcagttgtcctagcacccgatccatcctaggaaggagccttttgaagacagaagtggaaaggagagaatagtggacaagagaggtggacagttggcccaaggatgcccttggtcccttccctcccatgggccttgccctgggggtcccccagggcccatgactgcaggaccctcaccaggaaaccaggctgagtgggaagggggttcacagtattggcgggggctggggaggggccaggatgaggaggaagggcagcttctggctctcttcccagctgctgggggttggagctgttttttggcactgtctacaaggtatccctggggttgggaggaggaggaactggggatttaggatgctttctttgtggagttaagatttctttcagtttgaagaggcgctatctggcctatggtgaggttcccaagggagaaacagtcagggtcttctgcctcctgcctccccaggactcccaccccctccctggctggcaccatccacacagccttttgtaaaaccaagacaagtgagagaggtgagcaggagcagggaaacaaacaatgtgtgctttctccaggcccttcaacttctcttcctcttccaagaggagcgactatagggttggtttttgttggtggtggttcccaatctcaggagtccagataaggctggtgttttccacctgttcttggcctagccagtcccagtccctccccaggctctactaatggctagcccagatcagcagttggcatattcttatgcgtcagaatcatttggagggctccttaaaaccccagcttgtagggccccactccacaagctctaattcagtgggtcttgggtggggctgctaatctgcacttctatcaagttcccaggtgatattcctgctgctggaatgcaatacaagaaccactggctgagaatggtgcccgcagtcacctcattctgagcagcctggtgtctcctgggcagcactaaggagctgggccacagctggcaaagcccagccttggggcaccacatcacctgggaagctgctggaaatggtcttggggtgagtcccccgtgcagagaagtaaactaaggcacagagatcagtggcagagctgagagaggagccaggataccagggcccagtagagaaaggatggggctgcaggaccctacagcatgaggggtgctctagggaccacagggccatcctggtgctcatcacaggatcacaagactgggaaggtaggagaagtgaagacatctgcccagacctgggccaggtttccagattgccagctgaggtccctcttcttgggaatggtttgagtggcttccaaataaagagtgacaaggcagccagccctgactgcctcagcccttcaaagatgtttagagaaaaccaaaggtcccttcctcagggcatggtgtccagaaagctggtgaagggcaggaagggaggggagcagggccgttgggatagacaagcagcagaggaggctccaaggagggtgaggaaggagtggcagggctggcattggagagaagccctgagcaggagacttgggcccagcatcatgtcctcagtcccctcaggacttgggtctgtatattttgcaaactgcaaatgctgttgggttgggaggggtaaggcatagagttggggtgaactgtagattctgccaggacaagcagctctgagagtggtgaggtccagaggagaatggagaggatggttggatactgaatggacaaagagatggatcaatgaccagagacagggagagaagaacctgtcaggcagcacctgctttacagtcaaggccatctgggcctgggcagggcaggggaggaaaaaggagggatccaagccccccccacccaccaccacacacacgcccattgcaaagtgctggggctgctgctggcaggctgcttacagagaagacagtgtggcttaagggtggcaccggggggttgctggggcagggtgagcccagtgagaagggctggcagggctggtgcctcctgatgcattggaggaagaggcttttttttgtgtgtgtgagaaaacacaaaataaataaacacagaaccaggacaccaccacatttgagagcaaatatcagagttgggaaaccacagacgcggacaggaaggcttccctggtaggaagcagggggacaagaagccagttactgaggttacgggaaaatccgcacgaggcagcagtgctgggaagaacatcctgggaggactgagggctgaatactatagtgagctccggacccagaagaggaaaacctggcatggaccagggccactccatttgctggcaggaaccagccaaggagaagaggaggcaggaggacaagaggctttggagggagatgataaagaaagaatgggtgagtggtgggaagcagactgagcccagagaaaggaaggggctaaaccaagattacagaaagtcaaagcagtgtctcattcactactggggatgcaagacctgttaggagtcaggaaacctgggttctggtcttggctctgcctctggtttgcgatgtgaccttgggtgagccactgccttctctgggcctgattcctcatctcaaaaaatgagggggctggacacaaaaggacaaatactatatgattctacttaaaagagatacctagaataggccaatccacagagaaaaaaaaaaagtagaatagaggttaccagggactggggacagggggagtggggagttactgtttagtgggtacagagtttcagtttaggatgatgaaaaagttctggaggtggcagttacacattgcaaatgtacttcgagacacttagaaatctttaaaatggtaaatttaatgttatgcacattttgccatcattcttttaaaaaggaaggggtttagaccaaattatgttatggcctccttgctattcatgaagactagtgaagggggtgaggagagtattgtcccccaccccagggccagggcactgaaaggctgggctggggacactgagtgtgatcagatcactttccatttgtgtagaaccttacacttttccaaggagactcgcaggcacagtgttgcagttggtcctcaccacagttacatggggtgggacattatcctcactttacagatggggaaactgaggtatagactagaaacatgatctcgccaaggtcaatcacgttggtggattatttatttttttaaatagtcacctggaaaacatccttgcatcttaggttcacccgttgactcaccaactggctcagtggcccttgatgaaaggatacatgctataaattagtagaagagttcgtctcctggggccaacatgcttgcttcccataattggatgataaaaattataaatcctgatgtgtttctctttttaccaatggctgtcaggaaactcaagagtaaaacttaattgcatgattatgggaattacaccagttagatttacagaataatttctcttgcttttttacttcttatttttattttactgaacccctatgattaagattgtaaatagcctctgatgctttttgaaaatcctgagtaattaaatcagtttggttgaggactcgatcccttaagtccctgctcagtgctctttttaagatacagcatcatgtttattggttaaaagaaagatgaggctggatgccgtggctcacgcctataatcccagtactttgggaggccgaggtgggtggatcacctgaggtcaggagttcaagaccagcctggccaacatggtgaaaccccgtctctactaaaaataaaaaaattagtcgggtgtggtggcacacacctgtaatcccagttactcgggaggttgaggcaggagaactgcttgaacctgggaggtggaggctgcggtgagctgaaatggcgccactgtactccagcctgaatgacagagcaagactctgtctccaaaaaaaaaagaaaaaggaagatgacctggcacggtggctgatgcctgcctgtaaccccagcactttgggaggctgaggagggcagatcacttgagcccaggagtttgaaaccagcctgggcaacatagggagaccccctgtctctaaaaataataataataaataataaataaataaataaataaaataaaaaataaatctaaaaaaacttaaaaaaagaaagatagcctaataatcagggccacgaacaccaatggtgtggccaatagtgcctaagatcccccggggagggctggttttattttttattttttttgagacaagtctcattccgttgcccaggctagagcgcaatggcacaatctcggctcactgcaaccgctgctccccaccaggttcaagtgattctcctgcctcagcctcccaagtagctgggattacaggcatgtgccaccacacctggctaatttttgcatttttagtagagacagggtttcaccatattggccaggctcgaactcctgagctcaagtgatccacccgcctcagcctcccaaagtgctgggattacaggtgtgaccactgcacccacccctcaaccccaggagagtttgttaaacatgcaaattcaaggtggggcccaggaatctacattctgaacatgccctcagagaattctgctgaatggggacctcagatcaccctctggaatacacaaggctcagtgatctagaatggacttgttttatgcctgggttggccagcagcatattctgggtattctggacccaccaaaagcccccagcagggcagcggatttgcacagcaaacaggacagagttggacccaagttctcatctaaactcagtgacttctcatgctctgggatgagacctgtacctcagtttcctcacagcaaaatgggcgcactaacccatgtcctgccaaggctgcctcccagagttgtccctgagaggtctgaaggagatgtggggtgggaaacgatttcttttttgagattgggtctcactctgtcatccaggctggagtgcagtggcgcaatctctgctcctgcaacctccgcctcctgggctcaagcgattctcccacctcagcctcccgagtagctgggattacaggcacgcaccaccatgctcagctaattttttgtacttttagtacagacagggattcaccacgttggccaggctggcgttgaactcctgacctcaactgatccgctcgcctcagcctcccaaagagctgggatttcaggcgtgagccaccatgcccggccaggggaaacgttttctatatagtaaagtgctttaggcgggatgtgcaggggatgatgataaccattgttattactattattatggaagaagtagtgggagcttggggggtctggtgaggctagaagcaggggacattctagataggaggggagagggagaaagagcctggacgctgggtgggccagaggagaagaggctgggtgatgaaaccataaaagtgcatgcgggtggacatgatggaaccatgtcagcaagggtgtaagagggtcaagtctttgggcccttggccttgtcacatcggaagccaaccggtagaagagtgcacctggggacacctagaggtgggacccatcttgagttcatagaaagcaagacctcttagaggtcagcctttggtgggaaataaactgggggaaagggctggcacagggtcagaggattggattctgatgtctcgtgtgtgcaggcctaagagccactgatgcaccaaaatgacttgatttgcattccaatgaagtcatcattccaaaaggggctgatttggctctggaaagaggtgagacataagaaacatgaggtttcccagtttagggccatcatgccaactggtcccccatttccgccaaccaactgatgccaaccccatggacccaagccaagtggtctatgggggattgagccccgagggttccttgggactttggttgaagagagagtggagatggggaaaacagaaagaaggataaaggaggagaagaagggaatagcagtaaaaggcagagaggcaggaggaagggggagaacgggttcgagaagggcagcattccttcttgggaccccaattctccagggaatccccactgtgggtcaggcagttttctgctttgggaatgttaccaagacttaaaaggcatttgaagaaaccaacaaacttagaaatcacattccaaaagagtagagaatttttacaaaccaatccccccaccccaaaaaagaaaacaaccagttaccaagtaaaatgctaaaaaccgaaccaaaccaatatttacatgtaacattttcaaccccatccagccccacgtccagaggcttctgcaggaacagtgatgagtggccttgcacagtggcatgcaggaagtagaaactggggctttactgaaaaccaaggtctggctgagacaacaaagatggcaaggacaatcctggacggtacgatggtaaggctgagtggtccgtaggtcttggggctcaggtcccacggggatttctccccgaggctgagtacgcagcctccctggctgtcgctctgggaggtggcagaaggcctctggtggcttgtggcctgatgtgaatcccctcacctggagataaccttggagggcccccctgacctcatgggtgagagcagcagcatccaagagcggaactggcccacagctccactggctgcctgctctgcccacaccagtcactggggcatggaggaggcggctggcgggactggcatgaccctggtgttcagcctgcagggaagggagatgcaggacttggggtaactggtccaggtgatcccgaatgggtgggtctgggaactggcaggtgggaggtgggagtgcaggggcgcctccagagtcctgggggcagatcagcaaagctactggcttttggtcttcctgatgggcaattctgcagacaagctgatccatcctggtgtttccactctgggtccccagtcagttacaggaaggctgatgtctatgtgtgtgtggggagcatgtgtgcaaccaaaaggggttcaccggcaccaaggcgaggccatgggaggcgctgccccacatgctgcaatgagccacatcgaaatccaaccaatggctcaggcagctcacaggggacgtgaggaagggcgggcagcagagctggggcagggagaagagccgtgaaaggccataaggctaaggagagaggctggtgaaaaggctggcaggctggtgagaaccgaggcaggctgggagacactcaggtttatgtgcaaagctgcgataaacaacattctcaaagttcagtcctgttttcctgtgagttctcatttgggaaacttggagggatctccacactcttaatagagctttagtaatccacgttcgactcatgaagaaaggtgtcagagggagggagggaaatgagacaggcaatggagaacgtctggggagtggtgatggccgtccagccctccaccttgtcagtgagtatttatagactgaccgctggggctggccaagtaccaggcattgagtaataagtagtgttctgaggccacatggccagccgtgttggggtgcagggctccagctctgttgaggggccctccaaagctgaccaggaggccaggtctccaaacctggctgccaagcggcctcgtccacccaggggaccccatgcctgcccgtgctgttagaggcctcatgttgtcccagtggcaagaatgcatgtttcaacctccaataaattaccttagggactttggggtaaattaaattattaaaataaagtaaaccaccttaaatatttatagtaggaaaaattcaaataaacaatctaggcaagatacgtgtttccaggccccagtctactgctgtgtcctgggctctggcctcttggtgttctcctgggcctgacctggccaaccaagaatctcttactgggaatatctttgccccccgaccagctgcaggatgtaaacacagtggagatgtagtgcctgctgcctctcagggtgccagggaaagaggcctctgagatcacttgagatcaaggcagtgtatttaggcatttatctatgcaccaggtcttgagactgactctacctatttctgtcctcaaggggtctgctgggaacgttggggccccaagtcactttggcaaggaaggcaattgcaatcactccccaaccctgagccctgcatgtttccacttcgcctcccagctcttgctgcatccaggctatgggcagggagatccagggctccaggacactaagcaatggccctggctactgccctatcatactccctagtgtcccagcaatctagagcagtggggctgggaggaggaggtggtggagagaaggaggtgatggtgatgatgcccaacagggctccaccaggaaccaaacatggagccctagagcaaagcctgttcttctcagcagtgtctcctcccaaatgaaggggtggatggtcagcaggaaacatctctccgactccttttccccaaaggcatggccagacatgtatccttcttgggctcttccaagagggtggcatgggcagaaccaggcaaggctctctcttaggacccagggatcggctcttgacagatctctcagtggatgcttgggaagcccaggtttggtctctctcccactcactgccttcccctgggaagtcgaagctcaccacccaggggccagcaggagacccggctttaccttgatgtgaaagctgcattctggcagtggcatcactgctgtccctccagggccaggcaatgctgaggacacagcccctcgcctcacctcgtctcgtctctgctggttcccttctgctatccaggggctgggctggttgaggcggggagcttggctgctctgtcactcgctgggggggagtgccctctcctccccaccccagctggactctgaagggtgcagcctgcacttggaaggagagtggcggatggcagagcgggacgatcgggcgaagcaggaggtgagagactgggtactacagtcacaaacagcgtcctaggaagagggaggcagggaggcaggaagtcaagaggagccaggagacatggaccaccatgagctgtgtggtatgccaggcaaggaactgagactcggccataaaccagttcccaggggctgaagctcctcactggaccaattttttctttctgttgttcttctcccattagagcggtaatggaagttcattgtaatatattctaggctatacagagaggacagtggacactgtccatggtcctgcacgccaaagagattcttaacatacatttaccaaaatgacagcttattttgcaactgtaaaacacgaacacttttctgtcactaggtatgtctagatctccttcctttttatccttttttttcgtttgagacagggtctcactatgttgctcaggctggtcttgaactcctgggctcaagcgatcctcctgcctcagcctcccaaactgctggaattagcacctttgggtgctcatgcctcccaaaggcatgagccaccatgcctggctgatcgccttcttttttagtgtctctgtaccatttcactagatagaaataactgatttatatacccaattcgctttttttatttttttattttttagacagaatcttgctctgttccccaggctggagtgcagtggtacgatcttgactcactacaacctccacctcacggattcaagtgattcttgtgcctcagcctcccaagtagctaagattacaagcgtgtgccaccatgcctagctaatttttgtatttttagtagagaggggattttagcatgttggtcaggctcaaactcctgacctctagtgatctgcccgcctcggccttccaaagtggtgggattgcaggtgtgagccactgtgcctggccccaattcactttttatgtacatctgggtagtttctaattttttactattaccaataaacagaaataatgatcaaaagtgctgctgccaggcacggtggctcatgcctgtaatcctagcactttgggaggctgaggcaggtggatcacgaggtcaggagatcgagaccatcctggccaacatggtgaaaccccatctctactaaaaatacaaaaattagctgggcatggtggcatgcgcctgtagtcccagctactcgggaggctagggcaggagaatcgcttaaacccagggtgcggaggttgcagtgagctgagattgtgccactgcactccagcctgggtgaaagagcaagactccatctgaaaaaaaaaaaaaaaaaaaaagtgctgctggacagctggccatggtggctcacacctgtaatgccagcactttgggaggctatggcaggtggatcacctgaggtcaggagttcaagaccaggctggccaacatggtgaaaccccatctctactcaaaatacaaaaattacccgggcatggtggcacattcctgcagtcccagctacttgggagaccgaagcagcagaacggcttgaactcaggaggcggaggttgcagtgagccgagatcacatcactgcactccagcctgggggacagagtgagactccatctcaaaaaaaaaaaaaaaaaaaagtgctgctgggctgggccatgtgggaggctgagacaggaggatcctttgagcccaggaggtcaaggcagcagtgagctatgattgtgtcactgggctctggcttgagcaatagagcaagaccccatctctttaaaaaataaataaaatggcccgggcgcggtggctcatgcctgtaatcccagcactttgggaggccaaggcgggtggatcacgaggtcaggagatcgagaccatctgaaaccccgtctctactaaaaatacaaaaaattagccgggcgcggtggcaggtgcctgtagtcccagctacttaggaggctgaggcaggagaatggcgtgaacctgggaggcggagcttgcagtgagccaagatcgtgccactgcactccagcctaggcaacagagcgagactccgtctcaaaaataaataaataaataaataaaataaaagtgctgtgatagagccaaactgcttggttaaatcccagctttgccaattactagctgtgtgaccttgggagatttacttaacctctcttgagctttgatttcctcccctctctctttttttctttttcttttcttttctttttttttttttttttgagacagagtttagctcttgttgcccaggctggagtgcaatgatgcgatctcagctcacagcaacctctgcctcccgggttcgagcgattctcctgcctcagcctcccgagtagctgggattacaggcatgtgccaccacgcccggctaattgtgtatttttagtagagatggggtttctcggcattggtcaggctggtctcaaactcccgacctcaggtgattgggtgagccactgcgcccagcctctttttatttttctttatccatctctgtgaatatttccataggctaccttcgtaaaagaagaactactgggtcaatgggtagcacgcacattttacatactgaacaatatttggatcaactttaaaatcaacattcaaaatccagccagctttgtgctgttgtttcttgatgtggtgctggttatatggaagtgatggttaattttatattcaatatgactgggccacaggtgccgagatattacgtaaaacattgttctgggtgtttctgtcagagtgctttgagatgagattaacatgtaaattctcagccaggcgcagtggctcacgtctgttatcccaccactttgggagactgaggcaggcggatcacttgagattagcagttcgagaccagcctggccaacatggtgaaaccctatttctactaaaaataaaaaagtagccgggcgtggtggcatgtgcctgtaatcccagctacttggttgggaagctgaggtacaagaatcgcttgagcctgggaggcagaggttgcagtgagccgagatcacaccactgcattccaacctgggtgacagagtgaggctccgtctcaaaaaaaaaaaaaagcgaattctccctaacatggaccccatccagtcagttaaaggcttgaacagaacaagagggcttactctccctcaagtaagagaattcttcctgcctgacagccttcagactgagacacttgcttttttcctgccttgagactttattatttatttatttttgagacagagtctcactctgttgctcaggctggagtgcagtggtgcgatattggctcactgcctcctgggttccagcaattctcatgcctcaatcacccaagtggctggaactgtaagcatgtgccaccatgcccagctaatttttgtatttttttttttttttttttttgagatggagtctcgctctgtcacccaggctggagtgcagtggcgcgatctcggctcactgcaagctccgcctcccgggttcatgccattctcctgcctcagcttcccgagtagctgggactacaggcgcctgccaccacgcctggctaactttttgtatttttagtagagacggggtttcactgtgttagccaggatggtctcgatctcctgacctcatgatccacccacctcagcctcccaaagtgctgggattacaggcgtgagccactgcgcccggccaatttttgtattttttaagtagagacagggttttgctacgttggccaggctggtctcaaactcctggcttcaagcaatccacctctctcggcctcccaaagtgctgggattacaggtgtgagccaccacgcctggcccttttttttttttttttttttttaaaagatggagtcttgctctgttgcccaggctagagtgcagtggcgtggtctcagcttgttgcaacctccacctcccggcttcaagcaattctcctgcctcagcctcccgagtagctgggactataggcgcatgctgccacgcctggctaattttttgtattttttagtagagatggggtttcactgtgttgcccaggctggtcttaaattcctgagctcaggcaatccacctgcctcggcctcccaaagtgctaggattacaggcgtaagccaccatgcctggcctctttttttttttttttaatgtagagatgagctctcaccatgttgctcagactggtcttgaactcctagctcaagtgatctgcccacctcagtctcccaaagtgctgggattagagacatgagccattgcacctggccaaaaaaggaataaatatttaaaagatgtttttaaatgtcagccagctgagtgagagtatagaaaagtaacgcactcgccacacactgctggaagctgtagatatggcacacttttgaaaaacaatttggcagtatttatcaaataactttaaaacatttatatttttttttttgtgtggagatggagtctcactctgtcacccaggctggagtgcagtggtaccatctcagctcactgcagcctccgcctcctgggttcacgcgattctcctgcctcagcctcctgagtagctaggactacaggtgaccaccactatgcccggctaatttttgtatttttagtacagacagggtttcaccatattggccaggctgatctcaaactcctgaccttgtgatccacccgcctcggcctcccaaagtgctgggattacaggcatgagccaccgcgcccggccacatttatattctattatcctttaatctcatttctgcaacttatacctaaggaaatagtctgaaatgtaaaaaaatgattttgcaccaagatgttcaccacagcattatttgcagtagggacaaactagaaaccacctaaacgtacaataatagaaaagtagaatgtttgagtctatcacagcccattccacacacagcccttctcatgtctctgtgccccacagcagaccacatggtaccactcccagccatagactggaccaaggggtacactcgcctctagctgcaccaatcagagtttccttctttcagaaatgtggaattgggagacagggatttgtgtcagtctctcctaggggcttgaactggaagatgttgtaaagtcagagctgggacagcccacccagtccttgtgcaaatgcaacagagagagaaacagagaaaaaggaggaatatgatatcagagagggtgaagcttaaagagaggagaggaagacagggagaagctgctgaggttgtcaggttcctactcttgggttttataaaacatgccatccttcaaatacatttccttccctttctgcaaagttaacttatgcacattctaacacattcaaataatgctcactaacattcaaataaggtttactaattaacttataagaaactgatagcaggagtggggtgtgaaagattctcagaggaaatgtgagcacttaggtgtgaagtcttgatggggtggagaagtggtatgcccgctaatgtttaacaattagttttccaggagtgataggaggagccccgatttgtagtgtttaccaatttttatgctgtaaatcctcccactgtggccaatctcaaggtaccaaggtgatgttaaacacagagatgtggccaggcgcggtggctcacgcctgtaatcctaacactttgggaggccaaggtgggcggatcacttgaggtcgggagttcgagaccagcctggccaacatggtgaaaccccgtctctactaaaaaatacaaaaattagccgggcatggtggcaggtgccttaatcccagctacttgggaggcagagacagaattgtttgaacccaggaggcggaggttacagtgagccgagattgagtcattgcactcaagcctgggggacaagaacgagacttctctcaaaacaaaaacaaaaacaataaaaaaaaaaaaacccacagagatgctgacaattggctcctgcaagccaaacaagctggctctagcacaccactgggtggcaggagagcagtaaggccccttccctggaggggatgctggcagtctctggtgggtggagcaaaagctgctagttaagccatgctcactagtctcttggaattcagaccatgtgaccatcaggtctgtgttgttccaggtctgggaccttccaactctatcctagaccagcataagaacttcctggaacacatggccatatccctgaatttttattttatatatatagatatatagatagatagatagatagatagacagacagacagacagacagacagacagacagacagacagatagataattttttttttttggtgagacggagtcttagtctgtcacccaggctggagtgcaatagcacaatttcagctcactgcaacttccgcctactgggttcaagtgattctcctacctcagcctccagagcagctgggacaacaggtgcatgccaccacgcctggccaatttttgtatttttagtagagatggggtttcaccatgttggccagactggtcttgaactcctgatctcaggcgatccacccacctcggcccatatctctgaacttaaaaaccaaaagagcttggaccttatatactaactccacctactaagagaaaggacagatcccacccacctacctcattgggaaggaccacggctccatctccgtcccggaggacaccatccttccccacctgggggagcatggtgagtctgacctcctcactgctgcccaacttggctgccttcttgttcaggatcctggccacaccctctggctgatggtagctggctggggagaggggctctggcttcttggtgccctcctctcctgctgatgaggtggggctcggtgcccggccacacacattacggaagaattcctgcacaatgccgtacttgggaggctcgggcttggcccgcgtctcagacatgcctagtttccagacagactccgtgctccctgagtgctccaccacactgaagaggctggagagtccatcgttgatgtttctcaatacagggctgtcccgcgtggtggtggagcgggcccaggccgagccgttctgcttgccctggtgcaggttccacaggctgcggtccttgctgctgtccagcttggacacagaccgcctctggagctttggtgagccatacttgggggagcagcagggccgctcgatgcgcgaatggaccttgtccagggaggaggagatctgcttgctgcgcacagacacgagcgaagagctgcggggtgaccaggccttgccatggaggctgctgcggggtgggtcggtctgcaggcccacgctgaccgtgcggatggtctgtgtgcccacactggccaggcccaccgtctggctggatgtgctcttcactttcctctccagtgagccggagcgcatggcctggcgcacacagttggtgatctccttcatgtcatcactcatgttgcctgacatctcaaagtcatgcagggccgctgggaagccaggcccggccgccgaggggctgcccgctgagcctccgtccaggcgctgccgtgagaagttgcagagccaccgaccataggagctctcagccagcccatcagcctcggccgactctttgggcttggctgtggtgaagaggaagccgggctcgataatgatcttgccctctttgtcatgaaccacagggactccgaggcgccgggccaccgggggactatagtagactcggatgcccgtcttgtcaggagccgtgtagctgcgctgcatctgcctccctggggggtcctggcaggccagggcacccaggtggttgcagtccctcgacgagagcccaggcttctccttggtgtctttctctggatcccctggctcggagctcacaaagccaaaggcagggttgttaggcagcttcttgccccgggcatctccgccagcaaggtaaggggaacagtcgagcaaactttcaaactcagacatggaagaaacagatttggttctgcgaaggacagaggaggaaacgtcgttattagtggaaataacactgagggcacactctggtctaccaccctggtccgtgtgctgcgtgagggcaaagaccaggaccgtcttgttcacctcttgtagagatgttgttggtgcccagtcccacattctgtctgcattttcttttttttttttttctcccaaacaggtcttgatatgtcacccaggctggaatgcagtagtgcaataatagctcactgcagcctcaaactcctgggctcaagtgatcctcccatttcagcctccagagtagctgggactacaggtgtgcaccaccaaacctggcttttttttttcttttttttttcttgagacagagtcttgttctgtcacccaggctggagtgcagtggcatgatctcggctcactacaacttccaccctccaggttcaagagattctcctgtctcagcatccggagcagatgaaattacaggcgtgcgccaccacgcccagctaatttttgtatttttagtagagacggggtttcaccatgttggccaggctggtctggaactcctgacctcaggtgatccacccgcctcagcctcccaaagtgctgggattacagatgtgagccactgtgcccagcctaacacctggctaatttttaaaaaattttttgtagagatggggatctccctatgttgcccaggctggtctcaaacttctggcctcaagagatcttcctgcctctgcctctcaaaatgctgggattagaggcatgagccactgcacctggcctctctttgcactttcacctatacacctaaaactgcatactctgaactgcatactccaccattctctatctgatggtttttttttctgcctgtgggatcatacttggctgtcctacacatagaagaagctagacccagcactttgggatgctgaggcaggcagatcacctgaggtcaggagtttgagactagcctgaccaagatggtaaaaccctatctcttagtaaaaatacaaaaattagccaagcgtggtggcgttagcctgtaaccccagctactcaggaggctgaggcaggagaattgcttgaacctgggaggtggaggttgcagtaaactaagattgtgccattgcactccaccctgggagacagagcaaaactctgcctcaaaaaaaaaacaaaaacaaaaaaaacaaaacacacgcccaaaccgaagctagagatagcacagagttaatgagttcacacccctaaacacagccctcaacaaacaataggtgggatatggtgaacaagtgccccagcctccttgtggtgggatgactctaagctgcatgttctcctctggctccctgagttcctccgacagcctgaactccagttgcccgtggaataacctggttgaagctccttttatcggctgctttcccttccctgtctcacttccaagtgtttcctgaaattctgtcccaaataaaccatttgcacttaaatctttgtctcagggtttgcttatgggggaacccaaactaagacgccatgaagctcctggcacacctattgcctgaatcactgaacacaccaggcatatggaaatgcacgtgtcagaccactctgattaacttcaagaggcagctcctatcatccccactagacagagatgggaagtactgctcaaggtcaaggtcatagagctagaactggcagggctggcattcaaacctggccctctggctccacagcctgtcccgcctgccttgcttctgggctggtctgatagcggctgggggttctgtttccctgactcctttcatgggtttcctaacagtggagacgtggtccttatggtcttggggtgggggtctccttggccatagcacagggctgggcccaaaggatgctgctcaataatcccaggaatagaggtcaatcttgactctcctaactccagaggcaggagaaaagaatcccaagaggagcaaaatgttttgtttccacctgtgttccattcccggactcaaacaacatgcagcagcctggaattcccactgccccaagccttccagctcctgagtggctcgggttccagagaaaccatatcccgatgctctcccaacttggatgcggtggggtggcggcaggaagagggcaaaggggcggggcagggctgcggtgaaagcaggtagagtgggtgcagggcgcagcaggaggtggagaggggcgaggctgtggggccggtcagagaggcagagcaggggaccagcatgcaagcacctctttaaaccatttcctccaagctcaacttcggaaacagcctccttgtcgtggatcttctcactgcgtgtctgtcaaggaagagagacaggaagggtcagttctggccaccagagcactaagggcatggaacaagagaccagccccgacctcagtgcttgaatctcctcatccggagagcaggaatgatgtcatcaatgatctagcatggtcagtttctggctgccctgcatccaactcccccaccatatgtgatccaggctgggccaatcagagctccaagagtgacccacccaaggaaagggaccacttaaaatttaatccaaatgtggtgactgcaacaaagcatccagtggtccactgctcagctggtggtgggcttgtcttcttcctcctcaaccctaccccctcacttagcccagtccctgggtggttgggttttttttttatttttttgaggcaggaaccatgagatacagactccagggctgaggagcccaaggtgcaagggtgtgacctatgagacagggttagcaacttcctctcatgtcccccacaagcagggacctttatggtgcagccaggagccaagatagcatggcagcagccgccccactcacctccttccagctgttgtcctgcttctccagctccgagtgcttcaggacccaggggtcggcagccttctgcagctgggcaagggcagagagggtgggtcggtaatgggcaaagctggtatgcaggaccctgctctaagcaaggccattccccagactccactctgcagcccacagaacctacatcatggacaaggggccaccttctcagtgggtagcagctcagagcgccccactctgcctggtggatttggaaaatgataataaaaggaactacttgcaggcatccttctagatgtcattatacctaatatagtaacagccatgactatgtgaattcatgttacaattcacagaacagctagactagctaagcagcagctacatcccatcagagtggcaaatgtaagatccaggcacccccactgctccatccacagtggccgtcatttatggatctcggcactttttcctgctgggccttgaggggcctctgcttctctcccctctttggagctccatcacttccaggtggcttgtgatggaacctatctcctatgcacacattagttaatttttttttttttttgagacagggtcttactctgttgtccagactggagtgctgtggtacgatcgcagctcactgcaaactctgcctcccaggttcaagcaattctcctgcctcagcctcccgagtggctggcatttacagggatgagccacctcgcctggctaatttttgtgtttttagtagagacgggtttcacatgttggccagcctggtcttgaactcctgactcaggtgatccgcctgcctcgacttcctaaaatgctgggattacaggtgtgaggcaccgcgtctggccgcattagttgatttaatcctcacagaaacagtgtatgataggtgttcttgtggttatttccatttggcagatgagaggatcaagactgagagaagaggttgggcagctgactgagtgaatgatcgtgtagcacttcccattgttggtggctccatctgtaccatctgacactacagccttctctggaggattgccttgggcaattagaaccgaatcactgccaatgacagacaaagacaggggtccaaaagaccggcccaaaaggcagaccccttgccttaaggtggaccaaactgtggggtgatttactgtttacactcctgggcatgtcatggggtcaggccgagggcagacttcatctgaaagcatatcttacgtggtttcttccccttccccatcctgactccatccgttaacaaatcacttgcacacagggtaaccaactcatcttggtttgcccaggactttctcagtgtttgcattgaaagtcccatgtcccagaaccctcagttctaaaaaaaactagtaggctacggctaggactattctagttttaaaagtcaaagtcccaggaacgcgctcagtcccaggcaagccagcatgggttggtcaccttacttgtacttgaattcatgtctagggctttgcttctaagaaactcaacatgagacaaacagtaataagggcaacaatgaaaataacactaggccaggtgtggcagctcacaactataatcccagcactttgggaggctgaggtgggaggatcacttgagcctagcagtttaagatcagcctgggcaacacggcgaaaccccatctctacaaaaaaatacaaaagttgccgggcacggtggctcacacctgtaatcccagcactttgggaggccaaggcaggtggatcacctgaggttgggagttcgagaccagcctgaccaacatggagaaaccctgtctctactaaaaatacaaaaaattagacaggcgtggtggtataagcctgtaatcccagctgctcaggaggctgaggcaggagaatcgtttgaacgcgggaggcagaggttgcggtgagccaagatcgcgccattgcactctagtctgggcaacaagagtgaaactccatctcaaaaataaataaataaataaataaataaataaataaataaataaaagttagccaggcatggtagagtgtgctcccagctgcacgagaggttgaggtgggaggatcacttgagcctgggaggcggaggttgcagtgagctgagatggtgccactgcactccagcctaggtgacagagcaagaccttgtctcaaaataagaaaagaaagaaacgaagaaagaagaagggagggaggaagggagggaagggaaggagggaaataacactaacatcagcaaacagcaatgagagatgaagaccatagaatcaaaccaagccccagacaggggtgggcttaagaagcactttgaatcttctggctatctcactttatttccatagctgccttgcaagatgagaaggtcaagaatggtcatccttattttacagatgaggcccagagatcagaggtgacttgactggggttgtacctggtggagccaggtaaggactggggactcctggtcagaagctctttcccaccagccactctgttgctttcaccagtctggcttaatcgtcagtccagtgtaaagaagaatgctgctttgggggatttggtttaaagtgcaggaggcagaagaatgtcagagacacaagaggctggagctagagggccggcaagtctctgatgtgagaacaacagcagaacatggaacccgtgccctgatgagctgacaagacacgcctgtgggctgacatgttccccagggatgacatgaagcttgtttcataatttcagaatcattttagaaacattttgttgttaatataataagaaggaattattcttttatagacaggaatttggtttgatggtgcaaacagatgcatgcatctgacctgctttccacatggtacctggatggttctgggatttgttagtcagcctgccatcctgcactccccaagcacagcctcctagcaagtgtgaacctcaaaggagctctttacctgcaggaaagtgggcatggcccaggaccaggaactttccagatctgggagttctgccagattctggtcctctcccttactcactttatgaccttgggcaaatcactttgcctcagtctcctcatctgaaaaaggggtttcatgaacgtgaccttgcaaggctgttgaagtactgaagagaacattaggaagaggaaatacctaagatccataaactcatgaaaaatgctcaccttcagtagaagtcagagaaatgcaaagtaaagcaatgagatagcatttcacaccctaacttgggcagacatttcaaagattggtaatcacaggaactggcaaagataaagcaaaaagggccttcttgtccttctcactgtgcagctggcaggagggtacatgggcaaagcctttctagaaggcggcctggcagttaccatcaactataaatgcatatgcccttggatttagcaatttcacctctaggaatctatcctactgaaatattcatgcgtgtgcagaaatatatgtgtggagatgttcactgaggcacaacttgaactttttttttctttttttagatacgaagtctcactctgttgcccaggctggagtgcagtggcatgatcatggctcactgcagccttgatttcctgagctcaagcaatcctcccaccttagcctctcatgtagctgggactacaggcacacattgccacaaccagcttcaggtcacaactttcaatagtgaaaaactggaaacaatctagatttaatcactgtagataacaaatcatagtatctccacactaggaacaccaggcaccagtcacactgaataaggaaggcctccatactcttgtgaacagctctccaggaaagacacaaagtataaataaatggacattaaaatttgattgatgattaaaaaacaaacaaaacaaaaccctgtaaatataaatttaaatagaaagaaaggcccagcgactcgggaggctgaggtaggaggatggcttgagaccaggagctcaagtccagcctgggccatacagtaagacctcatctctcataaaaaaaaaaaacaactttttttcattaaaaaaaaatgacaagaaagggagggagtaggctgaaatgtacctttgtaatatgtgaacattatataaagatgaagtcctgatttacgtaattaaaattaaaagtaaggccaggcgcggtggttcatgcctgtaatcccagcactttggaagaccgaggcgggcggatcacctgaggtcaggagttcgagaccagcctggccaacatggtgaaccccatctctactaaaaataaaaaattagccgggtgtggtggcacgtgcctgtaatcccagctactcgggaggctgaggcaggagaatcacttgaacccgggaggtggaggttgcagtgagctgagatcacaccactgtactccagcctgggcgacagagtaagactgtctcaaagaaaaaataaataaataaaaataaataaaataaaagtaaggccgggcatggtggctcactcctgtaatcccagcactttgggaggctgaggcgggaggatcacttgaggccaggagtttgagaccagcctggccaacatggtgaaaccctatctctactaaaaatataaaaattagccggctgtggtagcacacgcctgtaatcccagctactgaggaggctgaagcacatgaatcacttgaacctgggaggcggaggctgcagtgagccgagagtgctctctagcctgggtgacagagtgagactctgtctcaaataaatagataagtaaataaaaataaaagtgaaagaaagggaaaagtcaaaatcaagagtggagcagagcagcctatggtaggtggtgcctggctgcatgaagtgaactataatggggagtgagggtcaatgattgcttttcctttcctccttcttttgattggaggcctcccaattttcccatgggaaccactcttagttcctccctcttggttcctgggtttgggtaggctccaggggtgggcacatgactcatatctggccaatccactgtacttgctaagctgtaagatatgagcatgaaactaacagtggccatatttgggaatagcttgtttaagagtaaagctaacacagaggaaagcaggcctgacaggctgaagcagaaagaaaaatctagttcccactgcattctctaagtgcctggatccagctatacctgaaggagatggtgtgccagacctcactggatgagcacctagatccagctatacctgaaggagttcctgcttctgaatcatttctgtagcaactctcccttgcgggtggaagcggcttggcaggggtgggcctcacctggcttaggcggttctgcagctccttcacctgctgctccacctgctgcttctcaccctgcagccgctccaccagctgcagcttttcctggctccagttgcgctcactgatctgcagctgccgagtcagctccatgacagcgctgtaggactcagctaggaggtgctgctgctcctcacgctcccgctgtagggctgccttccagtcgggccctgcccgctccccggcccccttccctgtcttcagctccatctgcggaaagaagcagactaagcagctggcagcaggaggccactcctcttggcccttctctctccttccctcctgggtgccagcggggaaaaggggagaggtcccctcagaagacccctcactagggactaacccagcttagtcctccccactcagaactaacccctaacccctccacacaataagggtttgaagagctctttctataagccatgctcttctgtgggcttttcaggcatgatgtcagtatcctcataaaaactcagaaagattactagtggtcattccagcaagatggttttcttggcctcaaacctcagagtggcaggaaagggaatgtgcaacctttagactcaatgccccccattaacccccatgagctggtcaggttcttggtgggaggagcacctgaaatgcccaggtctttgggggcagcaggtgcaggggacaccgtggaatatgcagatggagggagctgtgagatctggaagagggttaggaggggagagtagtggccccaggaagtagccaggagactgtgagcagtgggaagaaggtggaattggggccgggagtggtggctcacgccagtactcccagcgctttgggaggctgaggccggcagatcacttgagatcagaagttcaagactagcctggccaacatggtgcagccccatctctactaaaaatacaaaaattagctgggcatggtggtgtgccatctataattccagttgctttgcaggctgaggcaggagaatctcttgaacccgggaggcggaggttgcagtgatccaagattgcaccactgcactccagcctgagtgacacagtgagatgccgtctcaaaaaaaaaaaaaaaaaaaaaaaaggaggtggaattggggtcacagggagccaggggttagaggtttgggggagcaagggccagtctgacacttattagccgggtgaccttgggagataaatttaactcctctgtgccagttttgtcatctgtccagcagagaccatcggagtgcctgcctcccagaggctgctgacgcctgggaaggcagcttgcagcaggggcaggctggatggaagaagctggagcccaagctgcagggtcagagcattctctctgagtgggaagaagcccaccctctcacttttcaggccaaaggaggcagcaagtcaccctcaggcacacagcagacaccaaacccccagggctcctggttaaggctcctttgggggcacgctggggagttgggaggggaggcccccattttgcgtggagggagcaaaatagagccaggcagttggggctgagggagtgcttatgaggaaatgaaggagcaaatgaggacagcaggcagtggggatgtgcaccagcctcacctgtgagcccagggcgcaatcccccaccttccttcccttcctctgtgactcccattccccaccgtttctgatacccttgctgtgtgactttaggcaagtctcttgccctctctgggccacaggtgaagcaacggcattcttattcctctaggagcatggccttggtattctactcccagatctgacagctaaaggcttggctgagagtaaggggagaggcgtctgacaggtggggggctcacctgggaggtatggcccttgagctctgcccgctctgtctcccaggtagccttggccttggcaaactgttgctgaagctccgtcagaccacggcgttcatcccggagcagccagcacagctccttcagcgtcaccttcatgtcggccagtgtcttgatgtactcattgggctgcagacaggaggcaaaacctgagtcaagagcctctgtggggtagggaggggaacctgggttcagagaactcacctaggagtccagcttgggacttcacgaggcctcaggcaagtcccacaacctccctaggtcatctcacccataaaatgggaatgacaggcccagccctggctacctcctaggctgacatgaggcccaaatctgacaccaagaaaaaaccctgcagttacagtaataattattcagcctaactctgagctgaatcatctggcttcttcaaggctctgcagcgtctgtgccgtgggtccttctcctcactcaggatctgcctctctgacccgctgcaggccagatgtggggtctaattcatggagactccctcagtttgcctgattctgtcccaaatcttctctcctgggcccatgccctcatttcccatccctaccccagctcaccgtgtgtgaccctgggatcctgaccccactgttctctctgacttatggcttgatttgaaggttcctgaccctagaccacaaggcccctcttcagatgactctagcctgatatccttacccttaccatgtacctcccaagccatactcaataccagaacaccttgccacaccttggcacacagagttctcttggtccagaatagtctttcccctattctctattaggtaaactcctatacatccttcaaaacccatcatccatgaccccttcaccgtgatattgtcccctatactgcaaagagaattacttgctgtcttgcctatgaccccacagtccatcatctggactctgttactgccctgggatgaccaggcaataacttgcaacttcaatgtccaggaatggggtcagagaaagcagtaggaattgattactgagcagacaaaggaatgaatggacacaacaggaccgggaaggggctggaaacacaccgtgttctgggtccagctgtcccccgtgcaggccttgttatcagaatgctgagcgtttatctcctcttcctccatcagcaagtacagctccttcatgctgttcacctgttttttaaaaaccatgcttaacagcaggtgggaagttttcccaaattttaattccaaccttgggcaccatgtaggtcgaggagcacggctggatagtcaggccctcctagcctcccacgacatctattctgccccaaagaccaggaagcatccctgagagtcactctgaaataaccatgttgacaggctgggtcaaggcaggcactgtggttgaaatgaaaaggccacacgcactcccacaatgctacataagggtgaccaaaggtttgggtggacagaagggaccttgctggggggttggactgcttgctgatagattctgggcaagagtccagggccagccaaggagatcagggacctagttcaggatggaaataagacaaaagggagcgagtcaccttctgtgctcaagcaatcctcctgcctcagcctcccaaaatgctgggattacaggcgcgagccaccatgcccagcatgattatgtttatatcttattaattatgcttattttggtaaatgtatatatttcttaattatatatgttatgtaattttctgtgtctctttattttttttttgagatggagtctcactgtgtcatccaggctagagtgcaatggcatgctcttagctcactgcaacctctgccttgcaggttcaagagattctcttgcttcaggctcctgagtagctgggactaccagtgtgcaccaccgttcccagctaatttttgtatttttagtagagacagggtttcatcacgttgaccagactggtctcgaactcctgatctcaagtgatctgcccaccttaacctcccaaagtgctgagattacaggtgtgagccactgcacctagccaattttctatgtttatgccctaattttttttccctaaagtaagtttctctctcttttactctaggatatggaaatggctagaaaggttttcaccaaatgtggagggttcgtctgagacaaactgacttaaaatatagactgtgtggcctgcaggtcattcccttaaactgggcttcatccagaggcctgtgagacttccaaacaggtgagagggctcctatgtttccaaacgtcacagaagagacagcttcggacaggaggaccgaggcgaatgctcccaggggcggccctgtgtcaggcactgcagggccagggcagcagggtgtgggcctatggaatggcggtagtgactctcccatgaggccctggggaggagctggtggcctgcgagaatgatgagccccactgagatagggtgatgcagggtcttgctacacactcaggtctaactgtcttgcctggctcctggggcatctgggctcctctggagtacccctgatggcgtaagtggcaacttgaggcatgccaatgctccctactggatctggacaggggactacagagagcagcctggactagaggagggccaagcctgggctagactcgaggtacctgaacccaaaaggacacggccaaagtgaacaatgtcaactaagatgagtgtgaccaaggtctgacatccttgtaagtccccttctcttccctgatgtgttgatgtgtgctgctgtgctgatgacaggacgcaagggctttgagcagcaaagggtcctgcatagactggggcatgaatgggtcaggtgggtcctttctaagcttcttacattcccagagctccgcccccacgtttcctgccacatcctaataccacctgtactatcaccaatgtttttaagccagcctactccctcttgttaagtaaacatatcttttggccaggcatggtggctcatgcctgtaatcccagcactttgggaggccaaggcaggtggattacttgaggtcaggagtttgagagatcagcctggccaacatggagaaaccctgtcttttttttttttttttttttttttttttgagaaggagtcttgctctctctcccactctggagtgcagtggcacaatctaggctcactgcaagctccgcctcctgggttcacgccattctcccgcctcagcctcccgagtagctgggactacaggcacccgccaccacacctggctaattttttgtatttttagtagagacggggtttcaccatgttagccaggatggtctcgatctcctgacctcgtgatccacccgcctcggcctcccaaagtgctgggattacaggtgtgagccaccgcacccggccaagaaaccctgtctttacttaaaatacaaaaattagctgggcatggtggcatgtgcctgtaatcccagctactcgggaggctgaggcaggagaattgcttgaacccgggagatggagattgcagcaggctgagattgcaccactgcactctagcctgggctggagtgagactccatctcggaaaaaaaaaaaaaaaagcaacgaatgcaggaaggaagcctgcatgctgatggcaggtatgtgagcctaggagttgtgtcaataccagctgggcgtcccttccctgtccctctctccccagcccacactcccagtcccagtccctggcccaatcttacctcgaggaagtcatccccttcgctgggcaaaaccttgccctgccgccagcgcttgaggaaccacctgagcttcatgaagagcagcaggaagttgtgcttgaattgctgggactcctgcaccagcatgttcttctcctggctccagaatttctgctccagcctccgctggaggctcagactctgcagctcaaactcccgcctcaggagcgccctctgctggtcctccttcagctgccgggggacaagagcttgagcaaccccagggccctgtcctctcccccacccctttctgggcccctggacaggggcagggaggaaagtctgggtggtgcctgtgagtgatccctgccggggatcccaccacacgtggcgcaatctattcagatgagcactgccctctgctcctgcaaaaacagtgacacatcattgaaggagctgggatttgaccctggctctaaaaaaccatgacatcatatactgagcacctcctgggcaccaaatgtctcacacgaatgctcatgttcaatgaggaacctgcgagggtgagcgatgatagcagggaggggtgacgcatggagagcaaagggcgtgccagggttgaggacagctgatgactaggcaacaccctaggaagcaatgcagtgtcatgcctaacagagggacctggattagaggcccagccctgccacactctggatgtgcaaccctgggcagagcactccagctctctgggcatcagtttccccatctgcaaaatggtgataagggagggcacaaggattaaaagacataatgggtagaaagtgcattggacaggcccaccatacagtaagggcttaacaaatgttattccagaactattatcttgattagaagccaggcctgatgagggcaccatttcataaatgggaaactgaggtcctgagagaaaacaggactggccccaggtcccacaggccgccaatgacagccctgttacacaactaatgcacaatggcaaggacaataacatcccagcagggcacaggggctgaagactcaggtttcccttgacattctttcattctttttttttttttttttttttagatatcactctgtcacccaggctagaatacagtgggatgatctcggctcactgtaacctccgcctcctgggttcaagcggttctcttgcctcagcctcctgagtagctgggattacaggcgtgctagtgcacgcctggctaatttttgtatttttagtagaggcggggtttccatgttggccaggctggtctcaaactcctggcctcaagtgatctgcctgccttggcctcccaaagtgctgggattacaggcgtgagccaccacacccagcctcccctgactttcttgacttcagagggcccatagatcctcaaggcctctgcttccagctcagagaggctgtaggaatagctgcctggaaagcgctgggcaccacgcacctggaccattttctggttgaaattgtcggcctcctcctttcgtagctgccgctcctgggagagctgctcttgcaagccccggaggctgtcgtgggcctcagccagcaccagctgcagctccttgatctgtggtacagacaggggacacagataatgaggagggagagagaggaagaagtggatagaaattgtgatctaaggatgacagtggtaggggaacgatgggatgttggacccaagctgtccaaatacaaatcaggcagaatgactgtccccacctctgagggtcgtcatgatgattaaatgaaacagtacatatcaaatctggcttttgttaccattggaacttgttcttttctctctgaaatttatcttaataaggtactgggaaaactaagtttgattcacaaagatgttcattgtttcattgtttataattgcaatattttagaaacaacttagatactaaatgatgggacttaaaagatgcttaatggatctatacatatgtaacaatccattcagtggtacccttaaggacagtgtcctttattgtatgtatgttattatgttatactacaacagaaagtagaaaaacaaaaccaaaaacgctataggcctccataaaaaaacatacaaaggacatggacacacacaataaatgtaaccagtgggaactatgtgaagaccttctgacctccaaccttcacccaccctcccctccttctctctctccctctctctctctctctctctctctctctctctctctttcaacggagtttcgccagctttgagcgtgatcttggctcactgcaacctctgcctcccaggttcaagcgattatcctgcctcagcctctcaattaactgggattacaggcacccgccaccacgcctggctaatttttgtatatttttgatagagacaggattttgccatgttgcccaggctcatctcgaactcctaggcttaagcaatctgcccacctgggcctcccaaagtgctgaaattacaggtgtgagtcaccgtgcctggccccagaactcctacataaaaccttcctaggcatggcaaatgtccctctgtgagaaagtaaacattcattatatggtcaataatatgatgatttggcagtggaaggcacagtgacttgaggtatatcttctatatctgttttgcattaaaaatttttgcagggctacatactgtctgctgtccctggtttcctccctgaactcagtggtcaacagcactgggcaattgtcactactcaataaagagtggctgaatgaaacaaataattgaatgtgtgcaggaaatcattttttctacaggtaagcctatagaataggcctatttcctggcagggcacagtggctcacgcctgtaataccagcactttggaaggctgagacgggaagatcacttgagccccagagtttgaggccagcctaggtgacatgacaaaaccctgtctctactaaaaatacgaaaattagctgggcatggtggcgcacgcctatagtcccacctaactgggagggctgaggctcgagattcgcttgaactcaggaaatggaggttacagtgagccaagatcgcactactgcactccagactgggcaacagagcgagactcagtctaaaaaaaaaaaaacaaaaaaaagaataggcctatttccttttcttagaaaatgacaactaagttatctcagttttttctctttttgccatggcttccaggaagctcacttagagagtctgatccatcagcttcaagtgagcttctccttcccacatagtcatgggctgaccttcctgggactacagagttgtcttccaagagatgctcagaaaggtgctcaggctggaaaatacataggactctgcaaggttcagggtttcagggatactccacccagtccgtaggagccttttcctgcttcaggctcattatgaagagcaaggagaagctcagcaggcttagaaggggctcagaactacccagaattccctgaggatcaaagaatcctagcaattcaataactaccattcactctaaccctcccgttacagatggggaagctgtggccagaaggtagaaatctgtccaaggtcacacaggaacactggtagaactgagacttgaactcaggtcccctgagtcccagagatgtgtcattatcatcataatcatcctcctcctcctcctcatcctcacccaatgtggaccatgccttaagctatggcttttcatgtatttaatcctttcaacaaccctgtgaggcaccttcattttacatgtgagaaaactgagaatcagagaggtaaaatgacttatccaagatctcacagccagaatagagtggatccacaattgaaacccaaactgcctggctatagagactgctgccttcctgctacatacatgagtagttccattaaattacataaattgttaaattcccagtggaatttagtacagaagaaaaaataatttatgcagatgagtttataagtttccttggatcaggccatgagaatgtcccaaacttccttatttcccttctggccttggctgccaagaagcctggaaccaaatggaatgccccaaacccatatcctcaccagctaagtgatatatggaccactctgcttttgacagggctcagtcactctcctcctacccaatcccatgcttgctcaggcctagacccacctcagaggcataggaatcattgtcttcagctcggtaaggcctgaagctccggctggggtcgggcttagagtccaagtcaccagtgcggaaagcctctcggatcctgggctcccattccggcaggtccctgaagtcaggtggctgcacccagaggcacaggcagaacaaaccaaagatcaccatggggaggggcccgaggggtgccagaaacacccaccccaggcctctgcgctccctaagaggcttgaaccacccacctgagggctgggaccctggtagattcacctctgcaacccagacccagccccagctgggggcactgctgccgtttaatgaatgtttgctgaaaggatgaatgagtaggtaagtgcgaagtgattttctgaatgtgtgccttgtgcacaaaccttttgagtcagcccaaactgtcctatcacatgtgtgacctctgttcatccctctttcaagaagaaccaaaagggagataacatagagcagtctatgggcacagtggcatgtgcctgtaattccatctacaatttgaggctacagcgagctgtgatcataccattgccctccagcgtgggcaacagagcaagactgtttctttaaaaaaaaaaaaaaaaaaaaaaaaaaggcaatgtgcttgcttaaaaaagcaagatgaaaccggatcaacaggtcttgagttaaagaaattatggcacatatccactgtatagttgttaaaaagaaagtgctaaatctcagaagggcacgatggctcacacctgcaatcccaacactttgggaggccgaggcaggtggatcacctgaggtcaggagttcaagaccagcctggccaacatcgtgaaaccccatctctattaaaaatacaaaaattagccaggtgtggtggggcatgcctctaattccagctacccaggagacggagacaggagaattgtaatttcagctacccggaaggcggagacaggaggcggaggttgcagtgagctgagatcgtgccaccgcactccagcctgggcgacagagtaagactctgtctcaaaaaaaaaaaaaaaaaaaaaaaagataaaagaaaaaaagaaagtgctaaatcgctctctttccctggaaatgaaaaattccctgccattgctctgaggatgaagatcaaacctcccgcatgctcagtgcagtccagcttcacattgtctcttcactcagtgtcctggacacaccacgctccttccgcctctgatctgagctgtgtctttgcacaggctatttgctctgctgaaaacactgtgttcccccagccatccatccctctgacctctggtcagatcagaggccttccctcagcatagggtctaggtcaagttccttgttcataaaaccatgtacgcttccttcagattcctctctcagtgtctaattgcacattcactgacatgatattttgggtgactctgccccactagatgataaggaccatgagagggggaatcatatctgtttttgctaatcatgacatcttcagcagtgagcacaaaaactgtgtgaacaacagacaaggcatcataaattaacaaactgatacattgcgttaaaaatataagttgtgtagtaacaatagatataaagcaatctgggtggaaaaacaaatatatgatagatgtgtagagaaggatttagaaggacaagctgcaaggatgaaatattctagatccactctactagacacacacaaatactgaacatttaaaatgtgactattaggccacacacagtggctcacacctatagtcctagcactttgggaggctgaggctggtggatcacttaagctcaggagttcaagaccagcctgggcaatatggcaagattccatctctacaaaaaaatttaaaaattatggccaggcacagtggctcacacctgtaatcccagaactttgggagacaaaggcggtcggatcacttgaagtcaggagttcgagaccagcctggccaacatggtgaaaccccatctctactaaaaatacaaaaattagccaggcatgatggagggcgcctgtaatcctggctacttgggaggctaagagaggagaatcgcttgaacctgggagttggaggttacagtgagccgagattgcgccactgcattccagcctgggtgacagagcgagactccgtctcaaaaaaaataaaaaataaataaaaattagctgggtgtggtggtgctcacttgtagtcccaggtactcaggagagtgagggggggagaatggctagagcccaggatatcgaggctgcagtgaactgagattgcaccactgcacttcagcctggccagcggggagagaccctatctcaagaaaaacaaaacaaaacaaaggaaaaaaataaataataggatctgtgcatgaggcaccttacctgaaagtctgagccaaggtcttttgccagaagaatctccttagagagcccctgggagcccaaggggggcagtgatgagaaggactcctgctgttccttgacagagcacccgaggactgcatctgccttccgcgtgaaggcattcagctcctgctgcagcacgctcaggcgcaccaggatggcatggatgagcttggtgtccctggggccctcgctgttgtcgggggcctcatgcagccggaagtcagcacactcgttgtccagacacagccggaggccagccgtgaagccattggcatcagccaccaggacatcgatggccttactgaccagggcggcctgctctctcagcccaggcagcacctcggcctccctggctctgcagagtcggaccgcatgggactcgtgtgtctcgcccaggggagcaggcacacactgggcagagtccccggcctcggcgtccgtctccagcatgggccgcgtactctggcaggaggcgaggtcacagcgctggaggttggagaggagcacgcggttctcgtactgcagcttcttgaccttgccgctgagctcgccgatctgcagcttggcggccgccagctcctcctgtgaaggttcgctgagcacagaacaactgtcctccgacagcgccacgtccagctcgtgctccgagcggaacttggccagctcgttcagcagcagcttgttctggtcctcgagctcggcagaggagcgccgcagcagctcggcctcctcttcgacaaactgcaggtgtcgccgcagctctgccaagctctccccgcactctccgccacccagcgcggagaaggccaggcgtgcctcaggacccccacagccacctccatgatccttcatgtcgtccatctcagcccgcaggcctcggttctccacctccagctccacgatgcggcggctcagcaggttggcttcctcctccaccagcttcaggtgcaccttcagctcggtctcccgcgagtggggggcatcggccagctcctcggctgacagcgcgctgtccaggtccccatagagcgagcggtacttcagcagctcctccttcatgctgtcattctccttggcaagcttagtgagcttcttgcacatgagggctgactcctcctttgcaaagtgcaactggcacttcaggtctgcactgtcctcctgggaccacagagacagacacaacccaggaaggttagtgctgggagtctcagtaccagccatggcattttggggagcactatgtgctgggaacacagggatgaatcagacacagccagaccctcaaggagctaagggtccgggggagacgcagaggggtagatgttgaaatgacagcaaggatggggcgccacacatagcctgggagtacaggaacaggtgacatactgatgagcaactgctgccactacagtttcatcagtaaaatggggcggtaacattacctccctcccagagccacagacgggattaaatgagctaaggatgaaaagggcctggcactctgacaatcccataccactaggagctaacggtatgtggcctttgctgcatatagtacttcatccaattcttccaatgaacccccaagacagggatagataggaaatggagcccagaaactcaaaatgactcgctccaatcacatggcagtcaagtggcagagccaagattcaagcctgggtctccaactctagacctttggatttgactgtagtgctgcttgctaagttcctggctggggtggggagcgagcatctaagcatctaagaaccatgggctcaggatgtggttttgggaaataaagtgggcagtgaaactaagaaaatgagcaagggggccgggcgcagtggctcacacctgtaatcccagaactttgggaggccgaggcaggtggattgcttgaggccaggagttcaagaccagcctggtcaacacggtgaaaccctgtctctactaaaaatacaaaaattagccaggtgtggtggtgcacgcctgtagtcccagctactcgggaggctgaggcatgaaaattgcttgaacctgggaggtagaggttgcagtgagctgagattgtgccactgcactgcagcctgggcaagagagtgtgactccgtctcaaaaaaaaaaaaaaaaaagaaaagaaaaaaaggaaaatgagcaaggggaggacagggcagaatctgggatccccaggccacttagagtcaggctcaggtcttcagaataaaaccttcctacgggggctgctgggaattacctgcaccaaagtcttcttatcggccttccccagggagcgggttcctcttttcttcaaggaatgctgaagtgagatttaattaaaaaaaaaaaaaaaagtcaggactgaaagctcacagaatgatgcacatgcagagagctgtcacagtgcccagggtccagggagggccccagtccccaggccaccccaccctgatggcactgactgttgagtaagaggagccctccagatcacccagtgagcagcaatgggagataggccagaagcattggagaagatgattctaaaaacacctgctcagggctcctcccctccagcctgctcccatgtgtgacccagttggcctcggcgaagacttggaaagctgtgtttctgttctcatttgtctttcatcaaaggatttcctgagcacctatcaagcgccaggtaggtaggtgtagagaacacagcagtgaaccagggaggatgttgtggtgctttgcccagattccccttcggaactgagacactcattcccagagctgagacctcaaagctgagtacctctcccagcgacagccattggttgaggagaaccaccttgtccaagggcaggtgctatccgtggatggagcccacatccagggatgggtccatgaccccttgcctcagctctacagggagggccatcctagctccagagctccccatgggatcgcctgagatcactggtgtaattcagcttccagctctgcctcactccctgtggtgttgttcccaaggagactcttccataaacctctgcatgcaaatctccatctcagagaaaatcctgtcttcatgaaactgacatctagtgggaactgtaattcagaatgaatactaatggataaaatgaatatggaggctggatgtggtagttcatgcctgtaatcccaacactttgggaggccaagacaggaggattgcctgaggccaagagtttgagaccagcctggccaacatagcaagaccctgtctcaaagaacaaacaacaacaataaaatgaatataacaaatcgtaattacacatgaggcttagaaatggtcataagagactgatggcaaacagtgattcaaaaatccagaagctggtctggcatagtggctcatgcctgtaatcccagtactttgggaggctgaggtgagaggattgcttgcattgaggagtttgagactagcctaggcaacatagcaagactccacctcaaaaaaataagatgtttaaaatccagaagcaataggggaaaaaatagatacatttgattatacaagcaaattctgcatggaaataaaaacaccttaagaaaagtaaaaacataaatgacaaactctgaaaaaatatctgcaatgtacaacaccaacaaagggttgatatcctaaatatggaaagagtttcacaaacagagcattaaaaggccagcagacctgtaggaaaataggctagagatatgaaaaacagttcacaggaaaagaaaggcaaatggatcatggcacatgaagacatcaaggcacatgatgatattcaaccccactcctgttagataaatgcaaattaaaattacactgagataccgtttctcacctatcagattggcaaaaatccaaatatctgacgacatattctattggtgaagctatagagaaacaaaaaggttcataaattgctggcaagaatgccaaatggcacaagccctacagagggaattggaggaaatgttacaataacaattactgaaatttctcaatgtttaaagaagtcattcaattagatgcacgattcttttgagcgcttcctcccaagagaggaggggtgattcctggtggtggtgtatgtataaaaccttgcttaggttgttttgacttttcaaggtgggctggtatatttttgaaaatggccccaggtgatttggatacatgcttgctccatcccccacctctcacaccccatccctgaaagtgacagccactgatctaatctgagtcccatttttctgaaaccaagacagaggggcagggacttgtccaaggtctcacagtacacccacagctgacctgggaccagttcttgacatagctcttgaccaaattccaaagagttggtaggagaaaatgtgtcttctctgatgagggccagagtgtagccagcacagtggttctcaacctggtacacatcagaattactcaaaaaaaaaaaaaaaaagaaaaaatactggtggtctgaggtaggtctgagacatcagtatttttcaaatgctttcaggtgattctgaagtgcaggtcggatcctctgtgccaggcaaggagagctccagatggactcctaagtacagaatatcttagagctcaatcaaatcctaaagagaccttttgaaatgcaaatgaggcagggaggcagaggctgatatttcagacgctgggtgccaagagccaggagccagtatttgagaagtgctgacctgggagctttcaaaagctggaagggaagaggaggaaacagggctatgggtcagaaaacgagtccttccacaagagccaggaggcagcagacaagggcagccagtggggccctggacggggcacacagaagcagacccccgtatagcatgcaagggggtgctgtgggctcagaccatcaggctatggaaggatctaggcccacctattacaagctgagtgggaagggctgtggcctcagctgggagttgaactctggggcccttgcaacgctgagtttatgatccctgggtgaaccctttcctctccctgaaattccattttctcatttataacactgggccatggattaggtgaccagagccccaccaatgactgcagactccctggaggaaggaagtgaagtgacagagaggagagccaggggtctgcataggtaccaaggggtcaggcatcacatgtgaatgaatgagatcacctaaagccattcaaagtactaagggatcatgagattcactgacatggtaaagtctctcagacactctgttaagggaaagaagtgaccagcaaaacaaagcctataacccaaatatgtccaccaactttagaatggattaaaaaaatgtggtctatccacacaacagaatatttactcagccacagaaagaagaaagaaatggctgggtgtggtggctcatgcctgtaattccagcttttggggaggctgaggcagttggatcacctgaggccaggagtttgagaccagcctggccaacatagtgaaaccctgtctctactaaaaatacaaaaattagccaggtgtggtggcaggcacctgtaatcccagctactagggagactggggcaggagaatcggttgaacccatgaggcagtggttgcagtgagccgagatcacaccactgcactccagcctgggcaaaagagtaagactctgtctcaaaaaaaaaaaagagtttaaaaatatatagaaacctgcattgtatgagactagagaaagacctggaaagatacaaagcaaactgctgatgctgggtcaggctgaggagtagaattgaaggaggcagttagggaaggctttcttctttaatttatgggttttattatttctattatttttgaatagataacaaagttgcatggttcaacattcaaaaaggacatagaagaatacagtgaacccagtcacccagttatcccgccccaaggcaaccaacgtaaccagagcactgcagcttgtccttggaggtatgctaggcatgcatctgtgtgcttttctaatgatatttttgcttcactgagtttatattacttttttagattaaaaaatacatattctggctggatgcagtggctcacgcctataatcccagcactttgggaggccgaggtgggtggatcacctgaggtcgggagttcaagaccagcctaaccaacatggagaaaccccgtctctactaaaaatacaaaaaaaaaaattagccgggcatggtggtgcatgcctgtaatcccagctactcgggaggctgaggcaggaggatcacttgaacccaggaggcagaggttgcagtgagccgagatcacaccactgcactgtagcctgggcaacaagagagaaactctgtctcaaaaacaagaacaaaaacaaaacagacaaaatgcatattcttagccgggtgttgtggcatgtgtctgtagtcctagctacttgggaggctgaggtgggagaattgcttgagcccgcaaggtggaggttacattgagccaagatcacgtccctgcactccagcctgggcaacagagccagaccttgtctccaaaaaagaaaaaaagcatattcacgtttacatttaaatacacatatatgtatacatagaaaaacttattggaagtatatgcacctccccatccacacagaaattccctatggcttattcgaatcttctaatctttttctgctaagcacatactactacctgctggggggaagggaaaagtcattataaaaggtttttaaaatatactttccccaagaagtcaccaaacacctttccagcaggcagagaaaaggtgtgaatgagctgagtggcttgaatctcaccagaaagcagggttgggggcagaggagacgagttccacccttttctggtaggacctgacacttcccccaccttatctaagccatgtgggctcccacacagccctgccattctggagggaaaacaaggcgggctcagagtgcacaaagaccttcctcccctctgcacggcagcagctggccaggtggctggggggctgcaccccgcaagaaagccagggcctgtcagagcccctttgtggagcccccagggatgaagccagtctctgcccaagaggcagatgttctggctctgggccttgggagggcaggacaaggcagggcggtgcctaggccccagcaggaatgcagccgcaaggcctggggacatgcccagccctgaggacaaactctgtggcctggcatgcaacaggggcttccccactcgccagcaactcacaaggccatctttgagcagccagtgtggtacctctaagcatctccctgtctacaggcttctaggagaagcctgagctatgtcctcccttgtctttccttcagcccaggagagagctgcctgagcacagctctggaggggcctctgcactcaaacaccttcctgccccactttggccaagaaacaaaggccaaccttccaaggaacaaaatgaatcttctgccaaaacagcagggcagattttcaccaaatctggaggagatgtttggaaaggtctcactgaaagcacagactgtgcttcaggtacaaaatttactctagattcttttttttttttttttgagacagggtctcactctgtcgcccaggctggagtgcagtggcatgatctcggctcactgcaacctccgcctcccaggttcaagcaattctcatgcctcagcctcctgagtagccgagactacaggtgtgcaccaccatatctggctaattttttgtattttttgtagaaatgggatttcgccatgttgcccaggctggtctcgaactcctgaacccaagtgatccacccgccttgacctcccaaagtgttgggattacaggcgtgagccactgtgcccggcctactgtagattctagaaggaacttggggttgggggtgtacctcaaagatttaggcattcattcttcctcctgagtggctgaaatggccacagagagaggccatgtggctcttgattagggagagatcacttgggggagaaaacaaagagtgttttaaacattggccccaaatcaaatgtcacaaggacagatggagccaactgcacgtgaagattggcaacgtagctgctcctttcccgggcaactggcagctctagacacagagctccttgccagaggaagcagaaatgtatttatttaactaagacaaatgcttctccagacccgcagccctcacggtggttgtgacactaatgaaaataataagtccttagtctgtgttaagcactttacttgcttgtcttgtttaattttcacaaacacctctgagaagtagggataatattccaattttataaacaaactaggctgggtacgatggctcatgcctgtaatcccagcactttgggaagctgagaagggcagatagcttgagcccaggagtttgagaccagcctgggcaacatagtgagagaccccatctctttcaaaaatacgaaattagccaggtgtggtggcgtgcgcctatagtcccaacaacttgggatgctgaggcaggaggatctcttgagcccggaagtttgaggctgcaatgaaccatgatcgtgccactacactctagcctgagtgacacagcaagactcttgtctcccccaaaaataataataaaataaataaactaagcgctagagcagttatatcatttccgcaaggttacagtcacttgcaagtaagtgccaagtctggaaaaaaggcagaaccgggctttgaactatcagccccttcctagcccaccaggtaggaattccggatgagaaggctgtgccagggaaggaagcagtcacaggagtgggcagcctcttccaggtttctgaagacacaacagggtcctaggagagcaagggtggggcaaggagcataggggcaacaccagaagagtcagtgcgggtttgagagatgtggagtcctgggtttgaatcccatctttgtctttccccagtcacgtctacatcctgcagttctactccctgggatctacacaagagaactaacacagaatctcagaaacgtgcacatgaatgttcccagcagcattattcatagtagccaaaacaacccagataaatggacaaatctaatgtggtcatatacccacacaatggatgattactcagccataaagaggaatgaggtcctgctacattcttcaacatggatggataaaccttgaaaacctgatgctaagtaaaagaggccagtcaccaaagactccatttggatgaagcatccagaacaggcaaatccagagacagaaagcggatgagtggttgctgggggcaagagggaaagggggagtggggagtgactgttcataggcatgaggttactttttggggccatggaaatgttctggaattagataatggtgacgctacaaaacatcatgaatatactaaaaatcactaaattatacacttttattttttgttgtttttattttaattttttttttcagacagggtctcgctctgtcacccaggctggagtacactggcgtgatcttggctcactgcaacctccgtttcccaggctcaagcaattctcccacctcaacctcttgggtagctggaaccacaggcttgtgtcatcaggtccagctaattttttaaatttttgtagagacaagggtctcaatatattgcccaggctggtctcaaactcctgggctcaagcaatcctgctgcctcggcctcccaaagtgctgtgtctggtctgaattgtacacttttttttttttttgagacagagtctcgctttgttgcctaggctggagtgcaatgatgggatgtcggctcactgcaacctccagctcccgggttcaagcaattctcctcctatttcaacctcccaggtagctgggattacaggcgcccaccaccacacttggctaatttttgtatttgtagtagaagtggggtttcaccatgttggtcaggctggtctcgaactcctgacctcaggtgatccacccgccttggcctcccaaagtgctgggattacaggtgtgagccactgtgcccagcccaaactgtacacttttaaatggtgagttgtatgatatgggaattaaatcatgattttaaaattgccaacaaacagtggcacctataaaataagacaaccacaccatgtccgtgggaaggctgttggagggttaaacaatgtgctggtgtggtcaaggcttctgtggtgcctggcacagagtgagggctcaaacacagcagctataccataataaatcacgtcaacactcgtattggctttctgcctaaaacacaaggaggggtgtgacactggaagagagggtagctgggcaacagtgccaccgcagccctcggccagggtctgccacctcccttctctctagcggagagctgtctccatggcaaccacatcagctcaggccaggggctcctgttcccagccgggtgacagcaccacctcggcagcctgtcaggatggcaacggcagatcttgatgatgggactgaggctctggcagaagaattgctcagggaccctcgtctccatagaaaccatgtcaggaaagagacggaggagggagaggataaacagcaaataataaacacaggctcccgcctcctgtgcacaagcctgagacaccacagggcacgcgaggagagctagaccagcctcactgacaccagctgcaaaaggatgtgaaccagtgtttcttgagcacctactctgtaccaggcaccacaaagggctctttacaagctttacctcttttaaaaatttcacaaataaattccaaatactttcttttcttttttttttttctttgagacggagtcccgttctgtcgcccaggctggagtgcagtggcacaatctcagctcactgcaagcttcacctccggggttcatgccattctcctgcctcagcctcctgagtagctgggactacaggtgcccgccatcactcctggctaatttttttttgtatttttagtagagacggggtttcaccgtgttagccaggatggtcttgatctcctgacctcatgatccgcctgccttggcttcccaaagtgctggtcttttcttttctgtttcccccctccccctccccctccccctctccctccccctccccctctccctccccctcccccctccccctcccccctccctctccttctccctctccctctcgatgcagggtctcactctatagcccaggctagagtccagtggcaccatcatagctcactgcagcctcaacctcttgggctcaagtgatcctcccacctcaacctccctagtagctgggactacaggcatgcacaaagatgcctggctaaatttcgtattttttgtagagacggggttttgccatgttgctcaggctggtcttgaactcctagccccaaccaatctgcccacctctgcctcccagaatgctggggttacaagcatgagccaccacacccagcctcattccttcttaaggttgaatagttttccattatacatgtgtactacactttgtttatccattcctctgttgatgaacatttgggttgcttctaccctctggctattgtgagttatgctgctatgaacacgggtgtgtaaatatctctttgagtctctgctttcaattcttttgggatatacctagaagtgagattgctggatcatatgattgttctatgtttaatttttgaggaactgccatactatcttattctttttaatttcttcatagtattctatggctacataatcttattaatgatcctaaacaacctcataggctgcgtacagttatcatcctgctttatttatttatttatttatttatttatttatttatttgagatggagtttcacttttgtcgcccaggctggaatgaatgcagtggcgcaatctcggctcactgcaacctccacctcccaggttcaagagatgctcctgcctcagcctcccaagtacctgggattacaggtgcccgccaccacacccagctaatttttttttgtatttttagtagacatggggtttcgccatgttggccaggctggtcttgaactcctaacctcaggtgatccacccacctcagcctcccaaagtgctgggattacaggcgtgagccactgtgcctggacccccctttttttttttttttttttttttggagatagggtctcactctgtctcccaggctggagtgcagtggtgcgatctcacctcactgcagcctccacttcctaagtagctgggactacaggcaggcaccaccacacctggataatttttgcattctttatagagacagagtttcactatgttgcccaggctggtctcgaactcctaggctcaagagatctgcccaccttggcctcccaaagtgctgggattataggtgtgagccaccgtgcaggctttgcttgtttgtttgcttgcttatcctgatgtcacagataaagaaactgagacttagagaggggaagtggcttcagggttccagccacatctctgctaaggagaggctgggtgaactcaggcaagctgttcctcctgagcctcagtttcattacttgtaccgtgaccttaagatgctttcagaaattgtctccccttttcactatcaagggttgcagcagcaagacggtgtgaagatggtgctccgtgttatgggccaggccatgggggtgggcagctgaatgaagggagggggctagccacccttagcagcaaacgcctcctctccctgcacactgagagggcattggcacatcacaccaacacacccagtgggaaggatggctggaggaatgttctggccttgggctgtggtgtctcagtccaaggacactggcaggctcgccctcgggggaggaaggcaggcagcgcctgcagcgaggagtgtgccctagaagaatgcacgatcctcatatctcatcagcaggcagagagctaaggcctggctctgcctctagggccagaagccaccccaggccatttggaacacagaaccctggaatggggggattccagcctttaagggacacctaggctgatggtttctagccggcattctgcagaaccccctgagccctgcatggccttgaggttgtccctccctctctctcaggggctgtttgctcatccacaaaatgggcatgatcgcaaccttgttagcatgaaaatgtttgagataaactgtcaagcagggcgcataacacactgtatacccaacacacaacaggaggagaaggtctgccaggggaggaactggcatgaacaaacacagacaggaatgtgtctcagggtcacattcgggaagcaccagtaccccagagacactggcctgagacccagcccctgcactgacttcacaccaaatggcaggatctcgcagtctcttgcagccactccacatgcgttattcctgttggtcctcacaatgactcagggcaccactgccccattgtataggtaaggaaactgaggcacagagggctgagccccatgcctgacattgttgcatgttttctcagttaatcctcccacagcggctgtggttctttgatgaatgactctctctctcattaccccgtgagctccctgaggacaggaactgggtgtgttttgttcaccattgtaaccttagtgtccagcacacaatttacacagtaggtgctcaggaaatgcatgttggaggaatgaatgaataaacaaccttgccagggaggcataagctgcccatttcccacaagcgggggctcacagagacactggcttgggggggcttgcatgtgcccacctgccctaggctggccctgctggatgcatgaggtcctcacctctctcggtcgctccagctccgtctgcagcacctgcttagccagctcagtctcgatgagccgctgacgaagctcttcgttctcctcctccagccgcgcccgtttcttctccaccacctcgagctccttatgcagccgcatggagatgtccttagagacctgtgcaggggtgggagagagaaggatgtgagcaggctgaggagagcccccactgcaagtcccactgaccacccgactttcacagcagggcaaccctagagacaggcaggttcctatcgcatcactgccacgctgcagatgagcaaactgaggcacaaagagaccaagaaactcatgaaggaagcagtagaaccaaaacccaaacctaggtaccgcaagctctcagcatctgtatcacagcacagccccagaaagctgggaagaccctgttctcaggaatgccttttcatttacctgaggcttttttttttttttttttttttgagacagggtctcactatgtctcccaggctggagtgcagtggtgcaatcatgtctcactgcaggcttgaactccagggctcaagcaatcctctcacctcagcctcctgagtagctgggactacaggtatgcataaccacaactggctaatttttgcatttttatgtagacacggggtctcagccgggcgcagtggctcacacctgtaatcccagcactttgggaggtcgagacaggtggatcacctcaggtcaagagttcgagaccagactggccaacatggtgaaaccccatctctactaaaaatacaaaaaattagccaggcgtggtggcaggtgcctgtaatcccagcactttgggaggctgaagcaggagaattgcttgaaccagggaggcagaggctgcggtgagccaaaatcatgccactgcactccagcctgggcaataagagcaaaactttgtctataaataaataaataaaaagaaacggggtctcactatgtggtccaggagagtcttgaacttgtggcctcaagggatcctcctgcctcagcttcccgagtagctgagattacaggcatgagccactgtgcctgcctacctgggctcttcacacttccaaagcctctcccagccaccacttgcccagtcctcacaaaagcctgtgggagggccagaagctcatcttaaagggaggagactgaggaactgggtacagtagctcacacctgtaatcccaacactttgaggggctggacacggtagctcacacctggaatcccacactttgagaggccgaggcagggggatcgcttgagcccaggaattcgagatgtgcctggggaacatagcaagaccccacctctacaaaaaacccaaaaaagttagcttggcatggtggcacacacctacaggcccaactactcaggaggccaacatggaagaatcacctgggccctggagttcgaggttgcagtgagctatgattgtgccactgcactccagcctaggcaacagagcgagaccctgtctcctaaaaacaaaacaaagcaaagcaaaacaaaacagagaggggattgagctgcagtggaaacccagagaagatgggccctagaccactgaatcccatctctgccagtgaccagcatgtagtcctgggcaaggcaattttcctctctgtacctcagtctcctcaactataaaatgaacgcagtgataacagggtcaaccttacaggcccgacaggataactgaaccagctattacacaaaagccttggcctggggcctgcacacagtgagttctgggtgactggtagctgctgctccaaggaactgaagcccagagaagggcatgatcgctggaggtcacagtgtgaccctgagacctatatctagttgtctgggatgtagaacaggcccaaaatgacaaagggtgggcagatgtccaagtcatccctacagaaagaagctagaggagctgcaatctctgatcctggtccaggactctgtagcaacagcaccccattcctggtagacaccctctgttctgtcccctgctggctggttgagggaagccaggaaaggaggcctgcagggatgaggaaggaaggcccttctgggctgggaaattgcaaccagactccatctctatgtacattgggaactactgtttggtgaatacctactgcatgccaaactcacccatcttcaccccaatcctgtccccattttacaaggaaactggagctcagagcagaagtgactcactcagggtcacgcaaagccagtgtgggttgagctgggctgggagccccaggggtttggctgaggggccagtatagcccagggtttcccaggggtgcccaggtttcgccagcaggaactccatgtggggcagagagcccagcaacccatgcctgctggtctcggaaatgactgttgtgcctcctccttgccagaagggaagagggccctccctggctctgacctctgcctgggccgaagcccagctcggcacggaccccttggcaatgtatgaggcaggccaggaaaaacaacgaccagaaaggaaaccaggcatggcctctccctccctgcactgccactgcctgtttctgcccgaggatctcgtaggacagccaggagcgggcccatgaggctcctcccacagcctctctgggtaccagaccttcctcatccacgaagtggggagaacaacccctcagtatcagaacaagggctttgcagataggaaaactagattcaagcccagttccagcatttactggctatgtgacccaggttaagttatttaaacatggtccccagtttggggctgttaggtcacccagtaagcccctgtcctgatcaacattccattcattaactcactcatactcactcactaactcactcactcactcatcctgcttaggcactggaggcaggagtggtggggtacagagatcaaggccgcagacatacttggcctcattcatatctatgtgtcccagcagcagcgcagcgtcaggcacacactaagtgcctaataaatgcttgttggatgaacaaataaatccaagggtccaacaagtgaaaagggagggagatgaatgagtgaatgactgaatatacatggggagtggtacctgccctcgcagggctgaagaggctgccctcaaatgccaaccccacccactatccaggaagggctgcacccctggctggggtgagggctcctctctcaaatgagctcccatctgggccagctcctctccacctgcggggatgccccatctccaccatgtcctccacctggggaggctaccagtccccatcaagaagtcacaatccatgtggatttctggatcctctggggttcatgaacaactctatggatttcatcccctcccatcctctccatgattccccagttcccttctgccccattctccatggaatccctttcctatttactccctttccctgatggctgctgtatcaaaagaaagcacaggccaggcacgatgactcacgcctataatcccaacactttgggaggctgagacgggcagatcacttgaggtcaggagttcaggaccagcctggccaacatggtaaaaccccgtctttgctgtctctactaaaaatacaaaaattagccaggcgtggtggcacatgcctataatcccagcttcttgagaagctgaggcaggagaattgcttgaacccaggagacggaggttgcagtgagctgagattgcaccactgcactccagcctgggtgacagagcaatactttgtctcagaaaaagaaaaaaaaaaatcacaactccaggcagccagactgggaggcaggagccctgtggcctgggcttgtccctgctcctcagtgagcctcagtggtcctgggccccctcggccctcacaagtgatttacagaatcagctggaacatcccccgggtgctcaccacgtgcttttcatcccgttgggaagcactttgattattatccccattctgaggctcagaaaggaaaggtcacttcccaaggtcacacagctaggaaggctatagaactaaggtttgaaatcgagtgggtcaactctaaagtctcactctcaggctgattttgccgtataggcccaatgcgtgaaaacacattacattaacatcaacaatacaagtattaataataaaccccaacagtgggcttactgtgtcaggcatttgaagggccccacgtgtctatcccatttgatcctcccagctaccctcaaggtaggggggctgagatactaagggaggcgcggcagctgcggcttccgaaaaccagggcaaatccctaaaccataaacaaatgcactcagccatgaggtcactgtttacagcgctagggcctggctcctgccaagtgcaactagcagcctccagcccctgctccccaggcatcaggcccctcggctcctgggcctctgtcatcctgatcctcagggagagggatgggagctctcacgaaagagcagctcctggccgggcatggtggctgacgcctgtaattccaatactttgggaggtcgaggtaggaagactgcttgaggccaggagttcaagaccagcctgagcaaaatagggagacccccatctctataaaaactttttaaaattagcagggcatgatggtgtgtgcctgcagtatcagctactcaggaagctgagacaggaggatcccttgagagcccaggaggtcaaggctgcagtgagctgtgatcagccaccgtactgcagcctgggtgacaaagagagactatgtttcaagaaagaaagaaagaaacaaagaaacaaggccgggcatggtggctcatgcctgtaattctggccctttgggaggccgaggccggcagatcacttgaggtcaggagttcgagaccagaccggtcaacacggtgaaaccccgtctctactaaaaaaatacaaaaattagctgggtatggtggcatgcctgtaatcccagctactcggaaggctgaggcaggagaattgcttgaacccgggaggtggaagttgcagtgagcagcgatcacgctactgtactccagcctgggtgacagagcaagacttcatctcaaaaaaaaaaaaaaaaagaaaaaaggaagagcatcccctggccaggcagcattctggactccgtgtggctgaatcctcctacaaaccccaggagggtaggaatgtcacccccactctacagatgaggaaagtgaggctcaaagaagggaggtaacctgcacaggtcacctaggaatgaaacccaaagccagaacattttctccagcaacatctgtatctgaggaagggggcgtgctcctggtgtgtccttggcttcccacaggagtcactttagaccagagtttagatcccagattccctggacctgacctccttgtatccggtctcagctcctcacgggtcctgggaatgtatgttgtgaacaagccctcctggtgatttttatccaccctgggaggctgagatcctggcctaccctcgcccccagactactagtctactactactaccaaccagtcctactagcctactactactagtagtcctactgatgtattgctcagaagaacttatacttgctgtgtgagttcttctcagcaataagaaaaccacaaccagaccaggcatggtggctcacacctgtaatcccagcactttgggaggccgacgtgggtagatcacctgaggtcaggagttagagaccagcctggccaacacagagaaaccccatctctactaaaaatacgaaaattagctggacatggtggcgcatgcctgtaatcccagctacttgggaggctgaggtaggagaattgctggaacccaggaggcagaggttgctgagatcacaccactgcactccagcctgggtgacagagtgagaccctgccttaaaaaaaaaaagaaaaagaaaaccacaaccaatacatgtttatttccagacctagtatttaatactctcttcacttgaattatttcattttatcctcacaaaaacctctagagggagggactcattttatctccattttccatgaggaaacaagctcagagatgtgaaggaacttacccaaggccacacagcaaacgtggcacagcagctctccgccccgtgaccttgccctcctcatgctgggcaaaggccccaccgaggttctgtaggtcctgtcaacggtgaggaccagcagagagggagagctgggggttgggggggggcactgaggcctgtggttttattcatgaccccccaccccaccccaccaatacccctctgctccataaaaccacaggagctcaaaagccctgaggattcagctggtcaaaagccacatttaacagaaggggaaaatgaggcaccaagcggtaggggcaagtcagggcatggaccacggagctggcagagcaagttggggaagtcccagaggtaccctcctaggcagcgcccgccccctccccactcgggtccatcaagccctccaagacgatgccagggaaagcagcattctgataacttcccaaaaccccccagaacgaccccagcacatggggctcagggtggtggccagaggtgtccatccagctcaggccccaggcccgcagatgagctcagcgctccagctgcagcgtggggagaggagggagggaagggcaagagggatgctgattggctaattcaaaccccaacagaaacggcccctcctctccgcccagactccggagagccacacacccgctccccacacccgcctccccgccgccgccgccgctgctctagctccacccacggaggcgccgcagccggcagctagctccaggtcccagcctctcctccgcctcttcctcatctttctgaagtctgacatttttttgtgtccctcccagaaatcctccactatatgcccaaacgcagattcctctgagcttctccagctattccctccccctccccatctcctccctactgccttcccccaccaccccccacccctcccaacccagtgattggaatctgaatatgcccgggagctgccctgtcaagtagaggtacgctttgaacttggaaactaactcattcttttttttcttttagagagagaccttgtcgctctgtcgcccaggctggagtgcagtgctgcaatcatagctcactgaaacctttaactcctggactcaagcaatcctctggccttggcctcccatatagctgggactataggcacttgccaccacgcccagctaattttttttttttttttttttttttttgagacagagtttcactctgtcacccaggctggactgcaatggtgtgagctcactgcaacctcggcctcccaggttcaagcgattcatctgcctcagcctcctgagtagctgggagtacaggcgtgtaccaccacacccggctcattttgtatttttagtagagccggggtttcaccatgttggccaggctggtctcgaactcctgacctcaggtgatccatccgcctcggcctgccaaagtgctaggattacaggtgtgagccaccacccccagcctctgctaattttttttatttttttgtagagatagggtcttgctatgttgcccagcctgatttccaactattggcctctagcgatcctcccacttcagcctcccaaagcgctgggattctgggattacaggcatgagcctccacctctggcggagacacaaccattggttgcctcatgtgtaggacagcactacaatcccattgtgcaccaacaagaccacagggggcgccagcagcttcctggaacaggcactcctgtttacctcccctggttctgctggcctttgaaaccatggctctccctggtcccttaacaaaggtttttcttttatattccactggaaaggctatagggcttgagtttgccagtgtcttccaacagaagggacttctccccaggtaagtgtgtggctgactcgcatcctgccgctcccctgggtcctcacaggagccatcttctgccaccttcctctttcccccttcctggctcaggcccacttctcccttgggccttcactcagaagtcacccctgcaggaagcctccctagggccccatcccagctcctcgtgtcaccagatcacactgggctgagttctgagggcagagggccgggcctgggggccctggagttctcaccaccagaccagagcttccgaagacaggcagggggacatcccacctgccaacctcccacccacccttcccctgcttcctgaagcagagagcagtgaggccaagctggaggcttgggaggctcatgagcctgggctctgccaccaacacactgagcgccccttgaccttcggcaggtattgcttttctctgaacctcagattcttcatcaagaaaatggaaataatgatagctaacatttttgagtccttatgctggcattttacccacattattattattattattattattattattattattattattatttttgagacggagtctcactctgtcaccctggctggagtgcagtggcgcgatctcagctcactgcaacctccgcctcccgggttcaagcgattctcctgtctcagcccctgagtagctgggattacaggcgggaaccaccacactcggctaatttgtgtatttttagtagagatggggtttcaccatgttggccaggctggtctcgaactcctgacctcaggtgatctgcccgcctcggcctcccaaagtgctgggattacaggcatgagccactgtgcccagcccgcattatttcatttaatcctcatataaccctgtgagatagagattgctgcaaacccattttacagatgaggacactgaaattgatgactttgctcaaaataataaagttcaggtatattggagccaagatttaaaccagccttgaccaactctaggccttcactacttctctttgtttttttttttttgagacggagtctcgctctgtcgcccaggctggagtgcagtggtgacacgatcttggctcactgcaagctccgcctcgtgggttcacgccattctcctgcctcagcctcccgagtagctgggactacacatgcctgccaccacacctggctaattttttgtgttttcagtagagacagggtttcactgtattagccaggatggtctcgaggccttcactacttttcattagcataattaaggaacctctgcctgacaccgtggctcatccttgtaatcccagcactttgggaggccaaggcaggaggatcacttgagcccagaagtttgagaccagcctgggcaacataatgagaccccatctctacaacatatagaaaaattagccaggtgtggtggtgtgtgcctgtagtcccagctactcaggaagctgaggtgggggtagcccaggaggtggaggctacagtgagctatgatcacatcactgcctgatacctaggcaacagagcaagaccttgtctctaaaaaaacaagaagaaaaagaaacccccatggaactgtgcggggacaattagaggctagcaccaggtggtggttgatactcaataaacagtagcttctcagccaggcgcagtggctcatgcctgtaaccccagcactttgggaggccaaggtgggcagatcacctgaggtcaggagttcgaaaccaggctggccaacatggtgaaaccctgtctctactaaaaatacaaaaattagccgggtgtggtggcaggtgcctgtaatcccagctacttgggaggctgaggcaagagaaatcgcttgatcccgggaggcagaagttgcagtgagctgagatcgcgccattgcattccagcctgggcaacaagagagaaactctgtctcaaaggaaaaaaaaaaaacagtagctgctgctagtaggaaggattcatattatgatatcattttgggatacccttgatagaagccctgtgggttcaccaggaattcctacttagatgaggaaactgaggcccagagaggtggtagaacttggccatggacacacggaaatgagatgcaaggccaacctgggccccacttagacttgtggtcccatcccagcaacaagggcacccgagcccaggctgaccttgacatcctgctccagaccacggataagctcgccgtccacctggccggtctgggcggcacggagactgcggcgctcggctttgcgcagccggtactgcaggatgcggcaggtcttgctggcctggtccagctgctgtcgcagctcctgcagctgatacacgtcctcctccatatagacgtcccgcatctccagcatctcggcccgcagctcctcaatctcgtcctgcggagggaaggaagagtcaggtcactgggcccacagtagcagctaggaggccggagtactggccacacctaggactgaatgaagcaccgtgggggacctggatgtggcaggctgaatgacagacctccaaagacgtccatgttcacattcccaggatctgtgaatgttgccttacatggcaaaagagactttgcaaatatgagtaaattaaggatcccaagacagggaaacagaagcagaggctggagtgagatgctttgatgttggaggaaggggctgtgatgacggaggaagggggtgcctctcaaggcaaggaaaaggtttctcccctggagccttcccgaggaatgcagccctgcccaaaccttgatttctagacctttgacctccaggatcagaagataataatctggtgttcatttttttgttgtttttgagacggagtctcactctgttgcccaggctggagtgtagtggcacaatctcagctcactgcaacctcctcctccctacttcaagcgattctccctgccttagcctcccaagtagttgggattacaggtgcccaccaccacacccagctgattttttatatttttagtggagacggggtttcaccatgttggccaggttggtcttgaactcctgacctcaagcgatctgcccgccttggcctcccaaagtgctgggaacaggtatgagccaccctgcccagcctggtgttttttttttttttttgagacggagtctcgctctgtcgcccaggctggagtgcagtggcgctatctcggctcactgcaaactccccctcctgggttcacgccattctcccgcctcagcctcctgagtagctgggactacaggcacccgccaccacgcctggctaattttttttttttatttttagtagagacggggtttcaccgtgttagccaggatggtctccatctcctgacctcgtaatcagcctgcctcggcctcccaaattgctgggattacaggcatgagccaccgtgcccttggcctggtgttcttttaagccactaaatttgtagtgatttgttacagaagcaacaggaacacactggggaagcaggagaggccatttaagaaacatggatgaggttgggcacggtggctcatgcctgtaatcccagaactttgggaggctgagatgggcggatcacgaggttggatcaagaccatcctggctaacatggtgaaaatccgtctctattaaaaatacaaaaaattagctgggcatggtggcgggtgcctgtagtcccagctactcgggaggctgaggcaggagaatggcgtgaacccaggaggcggagcttgcagtgagccgagatcgcaccactgcaccccagcctgggcgacagagcgagactccgtctcaaaaaaaaagaaacatggatgagcatcaactatgtacgtcctaggtaggccctgtgctaagcgcaggggcagggagggacaatggggtgggtccagccccttctatatactctgtatggagccccaagcttcaccaggaagatacacagtaaaccagaaaataataataacaaaagacacctggctgggcgcagtggctcgcacctctaatcccggcactttgggaggccgaggtgggtggatcatttgaggtcaggagtttgagaccagcctggccaacatggtgaaaccctgtctctactaaaaatacaaaaaaaaaaaaaaaaaaaaaaaaaaaatgagcccagcgtggtggttcacgcctgtaatcccagctactcgggaggccgaggcatgagaatcacttgaacctaggaggcagaggatgcagtgagccgagattgcaccattgggtgacagagtgagaccctatctccaagaaaaaaaaacaaaaacaaacctcagatactgttaagtgctataaagacaaagccaaaatgaaaccaaacaacatgagttatatgatagggtgagggggggtgctatgttaggggacatgatcagggaggccatctctacaaaagagacatttgagctgagacaagaaggaacagccgagaaagctagggggagaggttattccaggcagagggaacagtgtgtgccaaggctcagaggcaggaaagagctcagtgtgtcaaggtacagcaaggaggccagggcagctactgggttaatttgaggctgaggaaactgacaggagtcaaccacatggtactgtgaagggccaaatagaatttgggtttgggatttgtttgcttgcttttgttttgagatggggtctcactctgtcacccaggctggagtgcggtggcaaaatctcagctcgctgcaacctctgcctcccaggctcaagccaccctcccaccttagcctcccaagtagttgggaccaaagacacacaaccccacatcgggggtggggggtggggtgtgtgtgtgtgtgtgtgtgtgtgtgtgtgtgtgtgtgtgtgtatacagggttttgccatgttgcccaggttgctcatgaactgagctcaagcaatctgcctagctcagcatcccaaagtgctgggattacaggcataagccaccatgcctggcctgggtttgggttttaagcagagagggtaagagtatgacctcacttcctgaaggcagcttctgctaccgctgtcatcagcttccagctgttcctcacttctcctttgtaatcattattagcaaatttgcaattctatgtttaatagtttgtctcccagccaaaccatgagtgcctggaggcaaccccatttggcctagcaggtggtagcctcccaacaaatattaactgaatggatgcatgcatgtttagtcaggtcaaaaacaacaaaaaagacatacgaatgtgcaacaatcattagatactaagtgtaagggggagggaagtagaattacgcagaagaaatgcataattattatgtctcatacaaatgtgaaaacctagtcacaaatgggaatgataatacctactcttaatgtgaccgaatgatttaaataagattgtatactaagaagggaaactggccaggtgcggtggctcacgcctgtaatcccagcgctttgggaggccaaggcggtcagatcgcctgaggccaggagttcaagaccagcctggccaacatggtgaaatcccgtctctactaaaaatacaaaaattagccaggcatggtggtgggcacctgtaatcccagctactcgggaggctgaagcaggagaatcatttgaacctgggaggcagaggttgcagtgacccaagatcataccactgcactccagcctgggcagcagagcgagcctctgtctcacaaaataaaaaaaaagagaaacagagtcaccagggatgaatgacctgctaaaggcatccctgaggagccaggggaagcaccgaggatggcagtgatggaagcaggggtggggggtccaaggggcaagaaggcctctgtgggccctggagagggcagatctggagagccggattcctcagctctccctacccgtctttccccaaagaaaacggaaaggaagggactgggaagtggggtctcgtattcctccctcctcatgctgccactgggaggagggagtgtccactctgctcccgtcagagggacacctctggcttctgtccgagcacccctcaccacaccctcgctggggctgggaggaagggggatctgattttgtgcctgtgaaaggaacaaacatggggttctctctcttcactcctgcctgcccagatggggaggactgctctgctcttccaatggtcagcctggtaggatggctccctgtgaggaagggggtacgactggggttgccagcgccccctgaggctggatggatttaactcagagtcagggttagggagccctgccctccaggccagttctcacaagctcgagaggttttcctgcccatcggtttgactcctggggctgcagagaacagtcactttgccagccccccacccccacctccaccctcatagactcaccaccccaccagcataccacgtggacagaaccagagtggagaggaggaagtggaacagtaaatgatcacaccagttaaaaaaatgaggaagtgaaggatccacgcgctgtttcaggcagccggtgaaggaagcatgaaggaaagatcactcaggaagtgcaagccggtaggctaggccagcctccagatggatctgtgttcaaatcctagccatgccggttaccagcacctcacttattatctctagaaagttaaaatgacaggatatggtgatggaaagaataggagggtctaagtggaccccaagctcaggttgaaccaaggggaaatgcacacaaccctatgatgctgggctacattaacaaatgcatgacatttagatcatgggaggtaacatctcttacacaagatcacacccagagcactagagtcatttttggaaatcattttttttaacttttaaatgactgattttcttatttataaaacaggccaggtcgggcacgatggctcacgcctgtaatcccagcactttgggaggccaaggccggcagatcacgatgtcaggagtttgagaccagcctggccaacatggtgaaaccccatctctactaaaaatataagaattagccgggcgtggtggtgcacgcctgtaatcccagctattcaggaggctgaggcaggagaattgcttgaacccaggaggcggaggttgcagtgagctgagatcatgccactgcactccagcctgggtaacagagcgagactctgtctcagaaaaaaataaaataaaataaaataaaataaagcactggcagggcacagtggctcacccctgtaaccccagcactctgagaggctgaggcaggaggatcacttgagcccaggagttgaagaccagcctgggcaacacagtaagacctcatctctacaaaaaaaaaataataataataataataataacaacaataataataatgtattacatccaaataggccgtgactttaaaaatggctatcattggccaggtgcggtggctcatgcctgtaatcccagcactttgggaggctgaggtggatggattacctggtctggtagtgcacctgtggccccagctacttgggaggctggggtgggaggattgtttgagcccaggaggttggggttctgttgaactatgattgcaccactgcactccagcctgggtaacagagcaagaacctgtctctaaaagtaaaacatgatcatagagacagttttgaaaatagagaaaacaggccaggtgcagtggctcacgcctgtaatcccagcactatggggagaccgaggcgggcggaccatttgaggtcaggagttcgagaccagcctgggcaacttggtgaaaccctgtctttactaaaaatataaaattagccaggcatggtggcaggtgcctgtaataccagctactaaggcaggagaattgcttgaacccaggagatggacattgcagtgagctgagatcacaccactgcactccaccctgggtgacagagcaagattctgtctcaaaaaaaaaaaaaaaagaagaagaagaagaagaaaagaaaaagaaaacataatccatgcataattacaatacctgaattacagtggctctcaaagtgcagttcctggaccagtaacatcagcatcactggtgaatttgtgagaaattctcatgtcccaacccagacttgctgaatcagaaactcctagggtgagccccccaagggattctgatgaagggcgtttccttctagttatttccccccctaaaagggcaagagtcaggtctctgagcacaagtccccatgccagggcctgacacagagcaggatctcagcaagcatcctttgaataagtgaatgaatgaatgatagttctcacatgagcagctgtctccccaaggcctgcccttcaccacagtcaatttgtgacagcccaagatgttgcattcacgccagttccatctctccaggggggcctaggcctctcagggggctagtcccagctgcaggcagaatgcccgttagcccctgctggcacggccccacgtgagagggtgagctgacaaaggcaggcttgtggccccaggctgggtctgcagggacgtgggcgggagaggctggcgaatgcaggacttaggcaggggcgctgggctttccgggcccgaggtggggctaggagaggtgctgctggggcttggggaggggacccagagggcaggcctttgttctgttccagaggttcacagtcctcagggagcctaagaatgttctggggctctgtggtcatgcagtctgggcctccatcccaggagagctctccagtgacagatccaactgaaggagctgggggtggggggccctgggaggtgggggtgaggagcacaggcttcccagctccttcacagacagctcagtggttctgaagagcctctcccagctcccagaccccctaactgtgtggaagtggggagggagaggcccagctccactggactcagtaggcctcgtggctatggaacaaagttgtagacatggtgaaaccttgtctctactaaaaatataaaaattagccagctgtggtggctcacgactgtaatcccagctgtttgggaggctgaggcaagagaattgcttgaatttgggaggcagaggttgtagtgagccaagatcgcaccactgcactccggcctgggcaacagagcgagactgtgtctcaaaaaaaaaaaaaaaatcccctcaacaccactggggaaaccccaagcctcatcctctgccagacaacaaaagggcacagtgcctggtagtgcccacctcagagccttggggcccctgaccctcagccccaccacggcctggccacctccttcaagttgacctcttcaccttaaaggctactcttgaagctaacccagattttttagctggactagaaacggggaataggagcatgggggaggatgggggaccagggcacccacactgctgccaggataggcagtgcttccctttctagagaatgcttttttgctctgattacagttaatagctgtttttggagaaaatctgaagaaggtagacggctttctatctcttccaccggttctcaccagcttctgcagtaggtccaagtccccttaccgggtcctgagccagcccctggtctcctccctactcccgccttaccccagccctccagcgtccaaataggctgtgactttagaaatggctaccattggccaggcacggcggctcacgcctgtaatcccagcactttgggaggccgaggcggatggattacctgaggtcaggagtttgagacttgcctgaccaacatggtgaaaccccatctctacaaaaaaatacaaaaaaattagccaggcttggtggcgtgtgcctgtaatcccagctactcgggaggctgaggcaggagaatcgcttgaaacccagaggcagaggttgcagtgagctgagattgcaacaatgcactccagcctgggcgacagagacagactgtttcaacaaacaaaacacggctaccacctattaggaggctcactaattaccaggcccccgcacaggcagtacgtgcattatcagttgacagtttaatcctcttaccgaccctgtgaggtaggtgctgaaaacgttcctgttttgcagatgaggagacgaggctcagaagcttcgcagagctgcttgagcaagggacctgcggggctggattccaaacaagccacgtggccctgggtcagtgcgtcataactgtgctcttccaatttgttcagctattccctctgctagaacggcctttgccaggctgactcctgactatctcatccttccagaacatttccttcccagactctgattcaaaccccacactctgaaatctatggtccgttgtgctggtaattttaggttgtatttgtctgttttcatgtcaatcttccccaagagctagggagaagggcaggggctggtttgtgtctagtcctcagcatcacccagggcagaccgtggcacagagcaggtacctgtcactgtctatgggtagatgtaggaattaaagaatgagtatggggccaggcgcggtggctcacgcctgtaatcgcaacactttgcagaggccaaagagggaagatcccttgagctcaggagtttgagaccagcctggacaacatagcgagaccccatctctacaaaaaaattaaaaattagccaggcatggtgctgtacacctgtagcctcagatactcaggaggctgcaacaggaggatcacttgagcttgggaggttgaggctgcaataagcaaggattgcaccactacactccagcctgagtgacacagagacagtctgactcaaaaaaaaaaaaaaaaaaaagagtatagcttctgtcctgcccagtccacaactcccagccagctgcaaagagttaggaagacaggagttcaagaccagccttggcaacacagtgagtctccgtctctacaaaaaaataaaaaattttaaaaacttagctgggcatgtgcctgtagtccccagctactcaggaggctgaggcaggaggttcacttgagcccaggagttccaggctgctgtgagccatgagtgcaccactgcactccaggctaggtgacagagtgagacccctgtctctaaataaaaatgagagagggagagcctgggcagatcagaactggtcgcagatccctatgccacccaaggagggtaggcagggtctgtctacgtagggaacctcctgctcacccacccactccctgcccacaaggtgcatctctgtccaccccctgccaaaccatgagctcagcctgcaggaagcagcctctcaaaggcaaacctgctcccctcgatggactgattcccaagaatcctgggagaattgtccaggaagagcctcttggtcccggctgggccggacagccaaacatgagctcacactactgctaataatagcaagatcttgcacagcagcagagggcttcacagtttacaaagacattccatctgaatcatctcacagatcctcactgaaccccccactcccagtaaggaaagacaggaaccatcatccatgttctacagatgaagaacttcagagaagcacagggaaggtgggtggtgcccaagcacacgcaaacaggcagggggagggggtgagacctccaagcaggactcaaagtccaaccaccaacttcaagatctttccttggaaccagaactcagggagtccatgaacttggaaaatcacatcttccttttcactgacctctaagtaaaatgtagcatttccttctattctgggcctatgaacaaatcatcattatatgagtaatatctgtgactttgccaccaaaaaaaaatcacaggtattttcatatcatataacagttgctgcaaaaatgtcaaaatattatttacactcatcagtagtttgaaattatgctagttagatctgtcaccagaatttatgagttaataagcacacatattactatgttgtaatttaaaaatactttaataactgtgtttcaatatagttggtttccttttttttttttttttttgtgacggagtttcactcttgttacccaggctggagtgcaatggtgcaatctcagctcactgcaacctctgcctctggggttcaaacgattctcccacctcagcctcccgagtagctgggattacaggcatgcagcaccacgcttggctaatttttgtatttttagtagagacggggtttcgcctcgttagacagtctggtcttgaactcctgacaggtaatccacccgcctcggcctcccaaagtgctgggattacaggtgtgagccaccgcacccagccaaaataagatataactttaaatgttgaaatgaaatacaggcgggagaagcagagctccactttcaaatcacactttttacttattttattctttaagacagggtccctctgtgtcacccaggctggagcacagtggcttgatcacagctcactgtagccttgacctcttggactaaagtcatcctcccacttcagcctcctgagtagctgggactactggcacacaccaccatgcctggctgaatgttgtattttttgtagagagggggtcttgctttagtgatttaccagcctgggctggtaaatcacactttaagtgttctaagaaagattactttctatcagaaacccacgcagatataaaatgatttacgtttgtacactgaggacagcggggggaagtttagatttggggcccactggaacctttgcacgtggctccagatgcatggctatgacggaattggcctgcagcagctggtgagctgtggggctggagatgaaagtgaccaaacaccaggaccctctgcagaaacacaagtggcagcatgtggtctgaacccagcaacagctcccagctgggaggacacggagagaaccaaggggacatgaggctcccaaaggcaggagcaggttgcctcttgccagccaccaaggaagagacttccagagcggaagtccctcagctacctcccacccaagagtcagcccctagtgtccctggggaactctgatatgacccctacagaccatattctagcaactctacatatgccaaggctggctcaggggcggggagctggaatctgagcccacccactcccatgggactctgtactgcctgggactcctactccacacctgtttcccacctcaaaagccacctccagcagagcgcagtggctcacacctgtaatcccagcactttgggaggccgagacggacggattacttgaggtcaggacttcaagaccagcctggtcaacatggcgaaaccgtctctataaaaatacaaaaaattagccgggcgtggtggtgcacgcctgtaatcccagctgctcaggaggctaaggcggagaattgcttgaacccaggaggtggaggttgcagtgagccaagatggcaccactatactccagccgggatgacagaatgagactgtgtttgaccaaaaaaaaaagaaaaaaaaaagccacctccaccaaaagcctccctgactgtcccagggcacagcccttttgtttgaacaattagtgagtgcctatggtgggccagatccatcaccaaattattggatttaatccttatgatggtcactctgctcccaactaatttgttctccattcagtacagtgagtgattttttctaaaaccatgtttaaaatgtggttaaaactgtttaaaattttctcctgtttaaaattctccaatgatcaccaaaacctgggaatcacccaaatgtccctcagctggtgaatgataaactgtggtacgtccacgcaatagaatactactcagcgatgaaaaggaaagaactgctgacacctgcaacatggaggaagctcacatgcaggaagcttagggaaggaagccagactgagtaggctacacactgtatgagtctgtttttgacactctggaaacggcaaggctctagggacagaaaacagtcccggtggttgtcagggtctgaaatcgagagaggaactgacctcacagggtgaaatttggggtgtgaaggaactgttctatatcttggttgtggtggtggctacagaactggatgcatttgccaaaattcattttattgtatgtatttgtataatatattgtacagtatattgtatatatttgtacaatatattatacagtatattgtatatagttgtacagtatattgtacagtatattgtatatatatacccagtacacctgacctaaaaccccaaaaagcaaaaagcaaagcaaaacaaaacctccagtgacttttcatcacatacaaaagaaaacccaaatcccatcgtacagcatacaggccctgcctggcctaagccccgtccacttctccatcttcatctccctcgacgcctcctctcactggcaacacagcagccacttgggtcgtaggcaaccagcagccacctcacctgtcccacctcaaagcctttggccttgcagtttcctctgcctggatttccctgccccccatctctgccctgctggcttgccttctgcctcaagtctccactgaaatgccacctcctctgagaagccttccatgctcctccaggcccattacgtccatcttaatcccttgtttctttcttggcatatatcataggcttatttgtgatactcagcgttttatttgtctgtttgcctgcagaatgtcagtctctaccaccaggatgtgatgtcaggaggacagagcccagcacagtgcctgggacacacagaacagctcaataaagaggtgctgaatgaatacacaggccctcagaggggaggagaatccccctgttctactcccctacagaaaactacttctagtcagcgctcctgtgtttgaatctaattccttgattctgtgaagctaatgcccatgggtgcttcagaccccagtggtggggctcaagtcccagcccagcaacacccaggccacagccctgccagattccaaaccttacccaaatgtaccacctcctccccaggttccaggggcccaacaagccctccgacgggcagaccaacccagaagaatgacagagctgagctgagaggcccagaaccttcactctgcgaggcagcaaccacactacagaggaacgggagcctccgcctggcccgcctgctcccatactgccctggccaccatggtccctccctcaggccgaggcctgggctgcctcccatctgccaccctggctctgggccactcgtctcctgcccgggcccgggccactcaccccagccccggaagggctgctctgtggagtgggccggcagtggccacaggggcggcatgccagccccacccaagaggccagggcagccatctgccgtcccttctgccggtcccccaggagtctgtcaaggctccagatgagatcatcacacttggaccccaaaaaaggatatgcaaaaaactccgcagagctccacttctcagcccaaatgcaaacactctgggcacagcagcaggggagggaaaccaaagactcaatcccttcatacccagggacagaaaggccttgagaaggacaggggacaatcccacagtccctggaggggatagcactgagtgggaggggggactctgggcacctgtctcccaccccagagctcaatctagcttagcatccttgcgaagaagctagggtccagttttcaggaagttgcatcaaaggtcctgatgaggccgggcatggtggctcacacctgtaatcccagcactttgggaggctgaggcgggtggatcacctgaggtcaggagttcgagaccagcctggccaacatgatgaaaccccgtctctactaaaaatacaaaaattagccaggcatgatggcacatgcctgtagtcccagctactcgggaggctgaggcaggagaatcacttgaacccaggagacggaggttgcagtgagccaagatcacgccactgcactccagcttgggcgacagagtgagacttcgtctccaaaaaaaaaaaaaaaaaggtcccggggaaagaaggccaggacacgcagcctggcatcaccgtgccacatgatgtccccactccagacaacacagaggctgcctggccctggagactcaccacgtcctgctcctctggttgggaataatgagggaagactggggcctggacccgcctctccaatgccaagaaatgagatgctccctgtgcacccctgatccccgccagggagtgcacattctctcactgcagcccgagcaatccccgatgggagaggaacctcacagaggtcaagtatgttgcccagggtcacacactaagtggcacagccaggattcaggtccagttggagctcctataagctggactagacagtcttataatgaacaatggtgacgataacaatagctaacattgacaagcgtttaatgcgttccagacaccggactgagacagaaaagccattatctcttgctcagtgatgatccttagaggcaggcactattattattttatccccatttcacagacaagcaaacggaggcccaggaagataaggtctacgcagccagtcaggagtgagcctcccagatccgtctggtacagttctgcacaagagacactacagatgctctatcagggaggggtgtgtgtgtgtgtgtgtgtgtgtgtgtgtgtgtgtgtgtggtggttgttgttggtaagagaccactgcccaccaaggccacatctggcttgtcactgttgtcactctcccattcaaggccttacctggcagagcagggagatatccacaggccctacggcctctggggcattcgtgtcaggaagcgcctgacagtttcctcccatcctttccatgtgaacaggaaggaaggcagcatctggacctggatgtgtttaaaacatcccccaaacaccctctgggttgcagcgaaatctcaaaaactcagagcaggggtctgaggtctttagggatagaaggcaaagctccaaagagagtggcccaaggccacaaagcctgaagctccaggacaccccagcacttcacacccctgccattccccctgcctggcatcctggagagaagcacaagaccccagtcttgcctcttgccacttacaggctgcatgacctctaacaagccccttaacctctctgggccttagtttctccctttgtaaaaggaaggagctaattaccctggaaggtccctgccctcatgcagggaaaggtggggcagtgatggcatgaaacctatcattaccccattaataatctaatcaacatcgtggtaaatgccccaaaggaagctccagggagctccaaggtgtctgacacaggagcctgacctggggagctgctgctggggctgagcgctcaaaggtggaggaagaaaccaagggaaggagccgggaactgcaagcacaaaggccggatgggaagagcaagagcacgggacagaggccggggtgtgtccagcacccgcagagcttgggcggggcaggggtgggtgaggctgtgggaggcaggaccacacaggctgctccaccatggggtagggtcaaggagaggcggggaggggagaggctggtgcaactgactcgagcccagaagacccaaagcaggcctgggccccaaccagagtaaagatgttcagctgatccagcctagctagggaaccccagaatttttttcatagaggctgagcttttccttgtggctcaggcagtgagagatgattcacctccatttgagaatgaggggccgccaaaggtgtccttccattagcaaatgtgtatcaccagttactaagctggaggcactagcctgggccattcagggaagagtgacacgacgccgtgggggagggaaggggggacacagacagggatatacgtttgggggtgcccaaaatgcagtgcagctctgtgcataacactcagactgatgccccaagccaacacccacagagggacacccagagccaagcacagcccctgtcatcaagcacccagcttaacctggggtcacgggggtcacaccagagccagatataacaggcaagcgccaagtgctgtcgggtccttcccaggagccagacctggctaatgggacccacacctgcacactttctcttacggaaccctcacggcaacgtgcggggcaaggacatccacatccccattctacagatgacgagaccgaggctcagaaagggaaagctcagaaaggaaaaggcagagctgggattccagcccagtcagcttggctccagatcacagtgctctctcccaaccaccctggacctcggagaacaaagggctggcctgctgcttccacctgctctgacccctgctgtgcctcactaccgcaaagcaggtagatgcagtgctgactgaggcctccagtgatgccagggtcagcctggcatggagcaccccagctccaagttccttccggcaccaaggggagtgaacgtgaccatggatgaggtcatgcatgtggggactaggggaatgacctcagtgaaaaccttggctgctgggcaggcccttgcttgaacttagctgcgcccctttcctaggggactctctctgccccggaggctatgcaagacacggggcctcctcccctcctctgtgccaggatggtgctaggtgcacagaacatctgagctgtcagcctcccaagtgccccactagaaaggatcacatccccattttacaggaggaagacggagtcttggtgaggggtttgcacagggacagcatgcacacggaggaggtgacacagtgaggtttggctccagacttgactccagaggtggagttggcccctagaccacacagcctggctctcctccctccccaggcctctccggcagggcaggcctcaggcccagggctgcagacacataaaaggaggtggctgcagctttgctgcaacaagaccactcccagcaaggtgctcccttggcttggcattcaatgcccttcccaagccagcccaacgccccttcccagactctccccatccctgccagctcccaccactccctccagcttttccgtttcaagcctgtggtccacctccaggccctgcctactgcctttcacttaattgtacacatatttattgagcccctacaacatggcaggcactgttctaagagctgggcacagagacagccacttgaggctaactccccagctccaaggacacctcctcctccaggaagtctgccaagtccctcctctgagctcccatagctcctctagccacctctacccttgcctccatcattccccagccagaatggggcaccctttatagatgggagtggcatggccctctgcagcccccagcaagggaacagggggagaagggggagatagggccagcaggaaattccaaggagattagaagggagttgcccccgggcagtgtttcttctgtgggcagctcgacaatcggtccacttcactcagccccactggccctgggcccaggagctgggcatcagggacctgggggacttcggtgtagcttcttctgacttcaagacctaccacccccatccacccaccacccaggaccccaagacccccagctccagaaggttacaaagtcaaggccctggccacactccttagtgttcccagcagccttgtagaagtaagtctagtgagccactgaaaacagtagtagtttgtacacattagctccagggagacacagaccaggatttcctgtttctgtgtgtggatgaaatgtcacagcgtgtgtgtgtgtgtgtgtgcgtgcgcgcacgtgtgtgcgtgtgtctaggttccctggtttgagagcctctggctcctgtgggcaaatgctacatgcctaatgtttgcatgccagactgtgctgtgtccctgctgatgtgcatgtgggagtccccttggtgggtgtctgtaagcctcgggtaggtgtgcaagtctctgctgctctctttgtagaagaggcaggggaggtacccgggtggtgagcttgtgcctgggccagcctggcaagggtagatgtgcagacttctgtggatgctagtgtgtgtgtataacgtctgtgtgggtttgtgtctccgcctacatgtgtacttctgataagtctgagtgtgtctgcaggatgtcagtctgtctctgggacatatccgggtgtgtctaggggtgtaagatgtgtatatgagaatgtgtttctgacgtgggggttgcagcagggtctgagcctccgttgtgtctgtttggtgatgtgtgcgtgtgatagaatgggagttgtgtggctgcatgggtttgtgcacttctctgagtgagtatcctctctaatctgtctggaggcgtgcttctgaaagcatccaacaccagcgagtcactggatgggtctgtgagatgtgtgcaagtggctgtgtgtctctgagcttgagctgtgaacagtatatgtgcatttgtatgtgcaagacagagtatgcccagggacacaggctcagccccaaggaggctgcggctgggactcagggtaaggagcagccaagagctttgctgactgtggtgacctcctctcctccacccagtgacagactagagtcctccccctgtagctcctgggagccaagaagagaagagctacatgcagaagcctactacgtggccactgggtccagacacccagcacagggcctggtacccaggagccactggggaaatatgtgttgaatgaatgaatgaatgcctggaggaacggataagggatcggcaatgactgggacacactaacactcactgtgcactccatctgcgtcctcacattgaaaagggtcctcacggccctgggcgggcgtgcttgtcccccatgttacagaaggaacaatctcacacacatgcacacacaaacatcctccactaacccccacctcccccaggctccgggcccccagcatgccttagcctagagcctggcccatgacaggattcctctcaccaaatgtgtctcagcctagacacgctagttaacaaccaaaagctcactgctctggtcacactgcagaaagaacaggcccagagttagacaaacctgggttggaatcctggctatgtaatttagagcctccatttactgatctgtaaaatggcaagtggggatggattaggtgcttcctccaggcccttctgagctgacatctagactggctgcacttcactcacatctagaatcaccaaggagggaaaacacacacacacacacacacacacacacacacacacacactggctgcacttcactcacatctagaatcaccaaggagggaaaacacacacacacacacacacacacacactggctgcacttcactcacatctagaatcaccaaggagggaaaacacacacacacacacacacacacacacacacacacacacacacacacacacacacacacggcagggaaggtgatcacacctttccgttctccctggggcagctactgatgtattaacattctaaaactaaggaaatccaccctcctgcattctcccagttcctccaagaatgaagacacagacatcctgtctgcctattggctatgaataataacaattcctcaggcgacttgggttcactgcttgcaaaatgttttcttgtctattcacacttccctgattcctgatgaccatcgtatgaggttgtccaggcaggttccatcacctttacttatttttttttgagacaagagtttcactctgttgcccaggctagagtgcagtggcgccatctcggatcactgcaacttctgcctcccagggtcaagtgattctcctgcctcagcctcctgagtagctgggattacaggcgcccacgaccacgcctgggtaatttttgtatttttagtagagatggggtttcgccacgttggccagactggtttcgaactcctgaccttaggtgatccgcccgccttggcctcccaaagtgctgggattacaggcgtgagtcactgcgccaggccccatcacctttattatacagatgagaaaaaaagcagctcagagaagccaggtaacttgcccatggccacacagtaaacgggagagtcaggtttcaaagtcaggtcttcagactccaactctcagattcctccatccacacccagtgggttcctacatgttctggccacatggtacgtgcttaatggttagtggtgatgaaaggctggaagacctcagatcaccgggtctttgaaggtctcaggtgacgtgtctgctcggcagctaaagctgcatcttagaatcctggcacctcagtagttaataaccttcagacttccttggctagaagggacccaaggtcaggcagctcaactgcagccaccacatcaatctccctctgaacccttctcaagcaatcattccacaaaccctctatctttatccaagcatgcaaggtcatcccgcctctctctgaataattaaagtgacagtgagctcactaccttctctgtagaagctccttctatcttctcactgggagagagttgcccgatttatgctttcctcacttggaccccagagcagaccataccagactggagatcacagtccttcgcagttgacagttcccagtgacccctacaagggggaggtaagcctgagcagggccacccaccagacctggtgggacctccttcaactctgctcctgcaggggacatactggggatttggagtcctttcccttgtactcagtttctgcatcttagaggcaaagtagtccagaaaggcagaaaacacatcaagagtctaacacatgcttactccaagccctggcagcctagcgaccctgctctgggacccactctggccacagttttcccatctgtggaataaacaacacaacacctccagtaataacccctctatttatggtccacatttagtctctggattttgaccctgcctctgtgaggctggcggctgggataaacagatatacagagaagttaagggactaacccaaatgtacacagtgagaagtggcatgggctggccttgctctcctctcttacccacactccttcccctctctggccttagcgctgttcttgaactcaacgagcattccaatttcccttagcctgaaatcttcttactccagaccctcactcagttggctccacggcatcctgcagccctcagcctccctgtgcaccccagcccccaccttcgtgtgctcctggcaaactgtcccctttaccctcattatgatctgtgttgtgatttcttgtatgactattgtttaattctggtctccccaaaagctctatgaaaacagacacctcatcctcccttgtccacagctgtatcccagatctgccctagcacacggcaggttctaaataaacagctgccgaatgaaccaatgaggggccaggagaaagagcccagcctgccttgggtgatgaagaggatctattctgccctcacagaatccacaagagaacaggctgggtgcacatggaaacatgtcccgtgcctctgacaagagcagtgatcagaggtttactacataccaggtgctctaatggtgtttgcaggaatcagctcatttaaccgttgaggttggaaagcgtgttactgtcccatttttacaaatgagaaagcaaaggtccagggcctttaagtaacttgccaaagatcacgccgtcaggaagcgacagaccccagatccaatagcagcacgaagcctgagccactgaatgaatggtggaaattacggttccatcttggcccaaacgtgggatgtccccagctggaccccggcccctgtgagatcccgggctcaacccccagcctcctgggactgttttcccctttaaacagtcatgggtgcctcaaacagactttgggtcagagcctgatgacttcctgggatggacaggggcccatggagatgggtgcctaggagccctgaagcaaagctctgcaacccatcccccttcaccagagtgagtagcaggaaccgggaggcaggggtgaggaactcagagtttcggttaaggccaattcaggcagcactcactggaagcagctcagagcaccaagagggcaggagcaaaagacccttgtcctggctcgtcacctccctcctcctcctcaccttccacttgccctctccttaccaccggcttctgaagactcaaagagccgactgaactcccagttgccaacaccgaacccggcccttgggaagacatcctcccatttaacggatgaggagactgaggcctggcttggggaaaggtgtctcttgattcagacagaccttgtccttccatactacaagcatttacagaactcaggctggagagcagatcccggggaaaatggggagacagagacatagttgagcaagacaccaacactctaatgagggagaagcccatttggtcagaagagccacaaggaaaagttaaaacctaagtgctgagggcagacataaaccagcagcatgctgtgagctccacagccaggggcactctgggtgttgtgccaggccatcatccactgacaagagtcggcaacatttcagcctcctccaaaaccgtgcccagccagcggcaggagagctcaggaagcttccagcctcccagggagaggtcaacacgtgcaagctgggctgtccctaaagctgccatggcacctggaagcgtgcagatggagcccggctggcacccagtaggtgctcatgtccactgaaaaagcaaaggcaaagcctgctgtccgggggaagccctagggtccccacatggccacagggaagtcctgttccaggtgggcagttgccctcctctcactgcgaacatggaaaggcactggccacgaggggccaatggggctgttgtgtgcacaaggtctgccccagggagggcaaaagacactgtcctgggatttaggaagctgcctctgaaccggttctcccacgacatcatcctccaggctgtgggaccgttaggctgggcggaagtggactccagccaaggggatgttcccagatgtcatgctttcaaactggacccgcccagaaaggcaggcagagacaggcctgcgcccgggaaagccctgggtaacgactcaggatggcattcaggcctttcctgggcaggggatggccacaggtttccctggcggcggtgtctatcaatcccgtcccaagaaggagagcctgggcgtggaggttctgggcagctgaaggcagagatccatcccttccctggctacccacccccacctcagcaacgcctcccagaacgctccaaagctttctcaagtccccgctcccaggttagggccctgtagccagttccaaggtctttttcaggagcgcgcttcccaaataaagttgagagggggcggggggaatgagggagccccagatccacctcagagtggtccccagagggcttgggcccctttctccggattgttcagtgggaaggagggccggctggtgcctcaggcccgcgggactgtgacagccggcgacccctgcgacctccctttctacccgggcgcccccaccttgagatagtcgttctccgagcgcagctcctccagctcccgcaccaagccgctgggcccgcagtccagcatctcctcggtgaggtcggagaaggcaagcgaggcgctgagcggcaagcggctgctgcccaccgacgacgcggccaccgacggctcgtccggggaggcgggcggccgcgggggctgctgcgcggagggcgcgggctgggccggctgccccgtacggacccccgccgggcccccggccgcggactcggcgtcgctgctcagcgccagctccaggcccagcaggcgcgcctcctccgacgcgcagtccgacacctccgagctgctatccgtgaggctggggggcggcggtggcggtcgcggccccgcacccgagcgcggacggcccttggcacggaccccggtgcggaccccggccacccgcacacccgcaccgcgcgccccgggagccactgcgcgccccttcttgtccggccgtgaggagaacgcggcgctgcaggcgactgctgagcccgggcctgggccgcggcggcccttagccagcgaccagccggccacgtctttgggccgggccggcgacggcgcgcggtggctctttttcctctccggggcaggcgcgggtgcaggcgcgggctggggaccgcagccccggaccgggggctcggccgccggcgcctccatcgcggcctccctcggcctcagcgagctgcgcgcatggcccaggcccgcccggcctcgacgtccctggggagggacccggcgcggctccggccgctggggctgcggctgctctcggcccacctcggccccgacaccgcgtccccgtcccaagccccgccgcgcggtctctccgctgctctgggctcggagagtgcggcccgaccgcctccaggcgccccggctccggctgcggctccgcccggcgcccgccccctcggcctcgccgcgcccccggagcgcgcccgggcccccgccgcccgcacgccgatcgctccctcgggctccgagtccggctgcggcccgggccccggctccgcccggcgcagcccgccccccgcgcagccccgccagctccccgccccgccgcctcggctcgggggcgcgcggttccgcgaacaaaaggcggacgcggcgggagcggcagggagggacgcaggcagggagcgagggagggatctgcgaggcaacagcgaccccttcgagggtcaggctggcgcgggcagccgcggcccgggctccctcctcctccgctccgccgcctcctcccctgcccgctcggggaaggcacccggcggaggcgcccctgcgcccggcgtccgggcagggcctgcgagagcggcgggagccgggactcccgggccgaggccgggcggacctcagttcgcaggaacccgcatccatgcacgcccagcgcctcgcccctcgccccgtgccgagcgtgcgcgaactccgcccccttagccggcatcgccggagccgcgatcccatcgcacagatgcgtaaactgaagcctggggtgcacgcgccaagctcacggtctaggcggcgccgatgggacccaaagctcacacctcccgggcgcgctcgggctccccctgcctcggcttccctctcctggcatagggaccgtgaagccctgtgtgcatgcctggctcgcgcaccttgaccggcggatatttctccccatgcgcccccgacccgggtttcaggctctgtacggctaaaatggaagcgacccgtagctaggcgcggtggctcatgcctgtaatcccagcactttgggaggccgaggcgggtggatcacgaggtcaggagttcgagaccagcctgaccaacatgatgaaaccccgtctctactaaaaatacacaaattagccgggcgtggtagcgcgtgcctgtaatcccagctactcgggaggctgaggcaggagaatcgcttgaacccgggaggcggaggttgcagtgagccgaggtcgcgccactgcactccagtctgggtggcagagctagactccatctcaaaaaaataaacaaataaataaaaacaaaaataaaatggaggggacctattacgagatgtcagcctagcggatgctttggaaggcggttttggcccccgtgggggctggcatgggctgggacggttgccctgaccccacacgtccccaccaggagcagtgcaggaggacttgagctctgatgggcgtgttttctttcctcccgggcgtctgggcgtctccttggctcctggccgtgttgattttcccatgtctctcacaccttccccagcccccacaccgcctggccgctacgcccccatccctgagccaccgcagggcagagctggattgagtgctttgccccacagatgtaccctcgtccttagggtgccccacaccccttgccaccagaagggcagggctgtttttgcccctttacaacctctttctcctcctgttctctcctccccctcccatttatcccctgctctttcttcctccttcttctcccatctttccccttcctttcccccctccttttccaagtcttccttttcctcctctttcccctcttcttcctcctgcccattttctccttcttcttcctcccccaattcccttccttcacctctgcacctgcctgtgacacagcaggcaccaggtccacttctttgtctctgtcccacctcccccacacgctgtgaatacactcctggggcatcccctctctccagaggcatgacttcatctggatccaggtgagtgagtgctcctccaccccaacgctaggtgccctccatacggccaagtgaggagcaggcactcagcaggctcttggcaaacacttccgcaggggcatccccaccccctcctagcaagacaccagctcccctcacggcccactgactgtccacaaaccctgtttgcacaggcgccaggtacactgagggacgcagtggtgggcatgtcagtgcctgaactcatggagcacacagtgtgtgttgggggggaccacaaaagactcagcacaaacagggtggcatggcatgtgggcaggagtgctggagaaggatgtgggagccgcaggctagtgacccagggcaggccttcccacattccgggcctcagagtccccacctgctctggtctaatgtaacagatgacagggtccatccagctcagatgcccctggctctagtaggctgcatctagtctggcacagaaagatgctgtgaagctcttggaaagtgtgtcctctctctgtgcttcagtttctgcccctgtgcagaacataggtttggaggtgttgggtggtgtgaatgcagggacatagcagaccaggctggctcagccactcctgacacacccttggtcacatcagtggtcctgagattagagtggcctgcatctctcttctagggcagggatctgagtcctggctctaccacctatcctctctgggcccaacactcatggctggccagggaggggcctgtgggtcccacctgctctgaggtgctttggatttggggagtcaagaatctacattgtagacccagggaagccttgagaacaacagggctctggtggggagggactaggtggggctgacgtaggggctgtggactcagggtcagttcagaccagggataccacaaaggagataagacttgttgagagtccagaactggctacattgtagacggggtgaccgtccttgcgccggcacatcctgcagctgtgtgatgcgtggcctcttcctgtgtgccgggctctgtgctccacatttcagtaaaggatctccaaaaggtgaagatacttcttgtgactgattaatattttccaaagggtatatctcatcccaattgctcttcttacaatgtgacactgatgctcctccaattgagcggcacatgtgtgcggcacgtgtgtgggggcactgtgtgcccccaccttgaatctcagcagatcttgtgactgtctcaaccaacagagtatggcagaagtgttcatctgtgacttccaaggttaggtcataaaaagcaacatggattccacccagcttgcttctctctctctttctctctctctgtctctctggccactcacccaccatgataggaggaagcccaggcctcatggggagaccgcatgaaggtgatctagccaacaactccagctctggtccccactaaccaccagacatgtgagagagtgagcctgcagatgattcagcccccagacttggagctgccccagtggacaagtggagcagaaatgagctgtctcaccaaccctgcccaaactgcaaaataagtattgttgttttcggccactaagttttggggtcatttgttacataacactgggtagctggaatgtgtgaccaaggtcacacagcttggatgtggcagggctgggattgacttgaacccagagctgcccaattccagggcctgttgtggtaccctattgggctgcgaagtgcccagcacagacacacagtgtgtgctgcagaaagcgctactcaaaagagactgaagcattaccttgtaagaattatataacataggaagtgaagatgctgattacccaagtagaaaaacggtttcatttctcccattcaagctgctaaattgaccaacgtgatgaaaactgaatggagactcactcctggaaagcttccaagaggaggtgtgttttttccttttaaactaaagttgttttgttttgttttttcattatacagattaaaaaacaagcaactggctatgggaaaattagaggaatcggtcgggaaacctcattaaataggggagtcaggaaggcctctcagagaaggcagccttttttgtttttgtttttgttttttgttttttgtttgagatggagcctagctttgttgccaggctggagtgcagtggtgcaatcttggctcactccaacctctgcctcctgggttcaagcgattctcctgcctcagcctcccaagtaattgggattacaggcatgcgccaccatgcccagctaatttttgtatttttagtagagacgggggtttcaccatgctggccaggatggtctcgatatcctgaccttgtgatctgcccaccttggcctcccaaagagctgggattacaggtgtgagccactgcacccagccaaggaggcagcctttaaactgagttattctttttttttttttttttttttttttgagacagagctgtcgcccaggctggagtgcagtggcgcgatcttggctcactgcaagctccacctcccaggtccacgccattctcctgcctcagcctccagagtagctgggactacaggcgcccgccaccacacctggctaatttttttgtatttttagtagagacggggtttcactgtgttagccaggacggtctcgatctcctgaccttgtgatctacccgcctcggcctcccaaagtgttgggattacaggtgtgagccactgtgcctggcctaaactgagttattcaaggagccactgaacagttagggccttgccttttttttttttttttgagacagtgttgctcaggctggagtgctgtggtgtgatcttggctcacggcaacctccacctcccaggttcaagcaattctcttgtctcagccccctgagtgttgggattacaggcgcccaccaccacacctggctaatttttttttgtatttttagtagagacggagtttgactattttgaccaggctggtctctaactcctgacctcaagatctgcctgccttggcctcccaaagtgctgggattacaggtgtgagccaccatgcccggctgctgctttttcttttttctttcttttttttgagacagagtctcactctgttgcccaggctggagtgcagttgcacgatctcagctcactgcaacctccacctcccaagctcaaatgattctcctgcctcagcctcccgagtagctgggattacaggtgcgtgccaccacgcctagctaatttttttttttttttttgagatggagtgtcactctgccgcccaggctagagtgcagtgatgccatctcagttcactgcaacctccacctcttgggttcaagcaattctcctgcctcagcctcacaagtagctgggactacaggtgcccgccatcatgcctggctaacttttgtatttttagtagagacaggatttcaccgtgttgggcaggctggtctcaaactcctgacctcaagtgatccacccacctcgacctcccaaagtgctgggattacagttatgagccactgtgcctggcccacttctgttttctcaatgaagaatgcagttgccagccattcagagtaagagaaagaagagatctcagagagtgaaaatcaaaccttctgggacatgtcagggagtgtctggtcatcttatactcacctgaagttcaaaggggagccagtcagcccagtgaacaccgggtgtattcccttttagtcattttctctttgctaatttcaagtttcttttgcatagctgaaatcttactgcctatgcaattttgtatcctgcttttttcgcttaacagggtagcagaagcatatccccacacatttataacacatttataagctctttgcaaacatcactcttcatacttagaaataatccactgggctgggcgcggtggctcacgcctgtaatcccagcattttgggaggccgaggtgggcggatcacaaggtcaggaggtcgagaccatgctggctaacacggtgaaaccccgtttctactaaaaatacaaaaaaattagccaggcgtggtggcgggtgcctgtagtcccagctgctagggaggctgaggcaggagaatggcagggacccgggaggcggagcttgcggggagccgagatcgcgccactgcactccagcctgggagacagagcaagactctgtctcaaaaaaaaaaaaagaaagaaagaaataatccactgggccatgcgcagtggcccatgcctataatcccagcactttggtaggccgaggcgggcagatcacccaagattgggagttcaagaccagcctgaccaacatggagaaaccctgcctctactaaaaatacaaaattagccaggcgtggtggtgcgtatgcctgtaatcccagctacttgggaggctgaggcaggagaattgcttgaacccgggaggcagaggttgtgatgagccgagatcacgccatcgcactctagcctgggcaacaagagcaaaactgtcaaaacaacaacaacaacaacaacacagaaataatccactgaatggatgatgttccatgaatcacttcacctttcccccttttattagacacttaaattttttcctggatgactattgcagttctgaaagaggcagcatgaggtctggtcaagaagaatggagaaggcaaattgctggtcgcagtggcagtgcctatagtcccagctactcgagaggctgaggcaagacaatggcttgaaccctggagttctgggctagagtgtgctatgctgatttggtgtctgcactaagtttagcatcagcatggtgacctcccccggagcagggaccactaggttgcccaaggaggagtgaactggcccaggtcagaaatagcagatcaaaactcccatgctggaccaggtgcagtggctcatgcctgtaatcccagcactttgggagcccaaggcaggtggatcacttgaggtcacgagtttgagaccagcctggccaacgtggcaaaaccctgtctctactaaaaaaaaatgcaaattagctgggcatagtgtcacaggcctgtagtcccagctatttgggaggctgaggcagaagaatcgcttgaacccaggaggcagtggttgctgtgagccaagatcaagccactgcactccagcctgggtgacagaagaagactccgtccaaaaaaaaaaaaaattaaaataggctgagtgcagtggctcacacctgtaatgtcaacactggaggctgaggtgggaggctcacttgagaccaggagttcaagaccagccttggcaatatagcgagaccccgtctctacaaaaacaaaataaataaataaaagaaattagcagggcatgatggcgcatgcctgtagtcctaggtactcaggaggctgaggcaggaggattgagcccaggagactggctgcactgagctatgatcatgttactgtactccaggctgagtaatagagcaagaccctgtctcaaatataaagtaagataaataaataaataaagatataaaaagaaggtaaacttcaaggcagagtccagacatctgctaggccctctggtatctggaattccatcatagaagatttttgttcttgtttttttttggttttttgagacagagtcttgctctgttgcccaggcttgtgtgcagtggcacaatctcagctcactgcaacctttgcctcctgggttcaagcgagtatcctgcctcagcctcccaagtagctgggactacaggtgtgtaccgctacaaccggctaaatttttttgtatttttagtagagacggggtttcgccatgttggccaggttggtcttgaactcctgacctcaaggaatacacctgcctcagcctcccaacgtactaggattataggcatgagccactgcgcctagccttttttttttctttttgagtcagagtcttgctctgtcgctcaggctggagtgcagtggtgcagtctcggctcactgcaacccccacctcctgggttcaggcgattctcctgcctcagcctcccaaggagctgggactacaggcatgcgccaccacactcagctaaaattttttttttttgtatttttagtagaaatagggtttcgccttgttggccagactggtcttgaactcctgacctcaggtgatctgcccacgtcagcctcccaaagtgctgggattacaggcatgagccactgtacccagcctccatcacggaagctttctagcagccggttatgtggcagttgatgttcctgccagatcacacgctgagttttcctgaccatgaggacacagaatgggacagtaaggcaaaccccattggcttctcaaagtgctcagtggttcaggtgttgagcttggaggaggggtggcaagaagtgctaggcatgtgagccccaagccatttacagcttaaacacacattgcaacagccatgtttgaggtggcaacagggccctttgcttacttgttttccccataatacacgtccttttggcatcccacacttcccggagggaacactgccccaggacacccggccacgagcagggcatctggggacccatgtcctctccaccaagaccagcagaatagggtctctttcagctgtgaaaagatggcacaagctacctgtgaaacggtgggctcacccacctaacaggccggtgacctgggcacattccccaggggattcccatcccaggggcaggctactgaagccctttccagctttgaagttctgtgagtcaacaacagagcagtcattgagatcttactgtgagctggggacagagaagtagccccctcttcaatggatcgtctactgcctgccaaacatagcttcctgtgtgtgacctcgcctaatgtcaccacagtccagtgagaaacgtcctcatctcatctgagaggaaaccagcaggggccgagcctgccggccctggagcacagggtgactgacggagaaccccacaacctcaccctttcctgtagtgtttgtagatcagagattttattttcttttatttttgagacagggtctcactctgttgcccaggctggagtgcagtgatgtgattttggctcattgcagcctcgactttcccaggctcaggtgatcttcacatctcagcctcccaagtagctgggactacaggcatgtgccaccacacctggctaatttttaaaatttttttgtagagatggagttgcgccatgttgtccaggctgttctcaaacccctgggctcaggcgatcctcccacctgagactccccaaatcctaggattacaggtgtgagccaccgtgcccagccatattgcagattttaacctcaagggaatagtcttcagtggtgggcatcaagcaccaggacctggcatctggcagctgtggtgagaggcttcaggagagccaatgtgcctgctatccccacctctttgggctgttgggggcagagctgggtgccgggggatgataaggtcttgtttgtgtgtgcttgtgggatttgagtttctgatgtatcataatcactgctgggccttcccagctggaaccagagtgggcacagggccagggcttgccgccctctgggcagatataagagctagggaggagagcctggagtctgggtcagaggggccagccacctacccagggaccagggattggagctagctgccgcagacagaccaccaggtgggcagggtcagtgcccgtgtggccccctctctggggatcagggagatacgctaaaggcagggtgagtacatccttccacagctcccttatttcccttcaccctttgagctcctcaccctgcaactgaccaagggactgcctgtcccagaggcacccaggtggaggctgaggggtcacttgtcagggattcgagccctagactctcaaagagtcagtgtggggggattgtaataagtattgccactcacccagcacccacaaacaacataaggtactgttatctcacctaactgaggtcaggaggttggatgcctggcttaacaccctagctctctaggctttatcttcatttactcttacaacagccctgatgtagatgtagatattaatatttacaggtgaggtgactgaagcacagggatgtaaagtaatttccccaaggccacacagcaaagaaagtggcaaaaccaggatttgaactctctgactccagagcttgtcctcttaaccgccgtcctacactcatgtgactgtgatgagttccttcccttttctgaatggcagtttccttatctctagtccgagggtcataaggtttgatgaccagaaagatattaccttgagcttccctaaaagtacttggacatgggtcaactttaagcacctgggtaaccttgttggaaacacttatcaagaactatgcatatggcctttgatccagcattcaacttttgaaatttatcataaaggatacagtcagatttatgaacaacgttcattgcagttttgctaataattagagaaaattagaagtaaacaaaatgtccaacagcagggggaataagttatgaatgtcctgtgatgaaataatacgcagccactcgaggaatcatgcattccaagagcgtagggtatcttggagaattctcgattgttgttagtagaaaaagtattttataaaactgtgtggtcggccgggcgcggtgactcatgactgtaatcccagcactatgggaggccgaggagggcagatcacctgaggtcaggagttcaagaccagcctgaccaacatggagaaacctcgtctctactaaaaatacaaaaattagctgggtgttttggcacgcacctctgatcccagctatttgggaggctgagacaggagaatcacttgaacctgggaggcagaggttgcagtgagccaagatcacaccactgcactccagcctaggcaacagagcaagattctgtctcaaaaacaaaaacaacaaaaacactgtgtggtcaatatggtatgaacacataatgtgagccctttgcaaatatacctttgggggttgagagtttatttgtgagagatggaattgtgaatatttttatattcttattcttttccggtttctcaaattttctacaatatctaaatatcactttttaattagaaaaaaaaaagcttgggccgggcccagtggctcacgcctgtaatcccagcactttgggaggctgaggcgggcggatcacctgcggtcaggagttcgagaccagcctgaccaacatagagaaactccatctctaccaaaaatacaaaattagctgggtggaggctgaggcaaaagaatcactggaacccgggaggcagaggttgcggtgagcccagatcacgccactgcaccccagcctgggcaataagagtgaaactccatctcaaaaaacaaaacaaaacaaaacaccttttaaaatctattctttttttttttactgaacattaacaaaagtttatttatgtttcaatttagaaattcatatgttccatagtgaaaccccgtctctactaaaaatacaagaaattagccaggcgtggtggtgggtgcctgtagtcccagctacttgggaggctgaggcaggggaatggcgtgaactcgggaggcagagcttgcagtgagccaagatcatgccactgcagtccagcctgggcgacagagtgagactctgactcaaaaaaaaaaaaaaaaaaagaaattcatctgttccccccacccccatctgaaactaaatatggaaaaagaaacaaagacttaataaagaaactttctgttaaatgacaagcaaagcaatgatgaaagcctaaaatacatctgtgtttaggatgcaaagtaaaaatagctttttttttttttttttttgagacaaggcctcactcttgcccaggctggagtgcagtggcatgatctcggctcactgcagcttcctcctctcaggctcaggtgatcctcccacctcagtcttccgagtagctgggattaaggcgcacgacaccatgcccagctaatttttatattttttgtagagacagggtttcaccatgttgcctaggctggtctcaaattcctggactcaagtgatacggctccctcagcctcccaaagtgctgggcttaccggcatgagccactgcactgggccagattgttctttcagtctaggcatgcccccttctagcttctgttctaacacactcatcggcttggagagggaagtgaatggcagactgtcagtcccgcgaagtcttctgagattatctggttcaacatgttacatgttgtgtgtggtgaaactgaggctcaggagtgcaaatgggcttatccaaggtcatacggggaactagaggccccagacctccagcctgggccttaggcatctggccaatggcccacagtcccaaggccaggctgccagaaggacaaggaggtagaaaggaattgcaaccagaatctatggtgtatggttaatacgtgttacatgctaactgcaatgaggtcttgaatgccgagttgctcacagactcacccagcagcagctcggcctggagtgacaggtgagagggagcaaagggcagctggcgtgggcatggagctggctgggtgtgccccaggcctctccctctcatctctaggcctcacctatcagcgcttccttcctgggcagggctgaggattcactcactgcccacggccggctgagcagggacaggagaatgagaggcctccgctggcgttacactcggctggtaagggttccaactccgtctgtggtgcaggttgggaggtgaaaggaggtgaggtctctggcagggtggggcctgggctagggttggatgcgggcagtgacttgttcccctctcaagtccctccctggcaggcctgtggtttggagcaaggactgactcaggaacatggggtcttaacacccctgctccaaggttctcaagggggacagaccgatgtctctgtcccttcctccctggagtgggtgctggatggagctctgttcagagccacacacagctagacctgcctcaggcctgagcctggagaacagagcggggcaggagagggggtcctgtccatctctcagcccttgagaggtctcttcttcctgggaaaagcctgcaaggtcattgtgtggaggcacacacatacacatacatataacatatacacactcacacgcatacacatgcaaacacacacactcacacactcaaacacactcaaatgcactcatacacactcaaatgcactcacacactcaaacacacatacagacacacacacattcaaacacacacactcacacacacactctggtacagagtggaagctcggatgaatgaatgagtgaataatgatgccccttatggatgtagatatttacaccatcacaactcacacaaacacattgatatataaacacaaatttacactcaatacctccacacattgatgtgcctacacaactctattccaagccaacacacaattcgcacagacaaacacattttacatgaacctacatgtatgatcccacatatgactgcatgcatcatttcacgggcttcatggggaaacctttgggcttcattttcttcctttggaaaatgctgataagaagaaatacacagaaggccaggcgcggtggctcacgcctgtaatcccagcactttgggaggccaggtggatcatctgaggtcaggagttcgagaccagcctggccaacaggaggaacccgtgtctctactaaaaatacaaaaattagccaggcatggtggtgggcacctgtcatcccagctatttgggaggctgagacaagagaattgctttaacctgggagccagaggtcgcagtgagctgacattgcacctctgaactccagcctgggtgacagagcaagaccctgtctcaaaaaaaaaaaaaaaaggaaaaagaaaaaagaagaagaaacacacagagatcacagacagtgcacactgaacacaggcctgggcaaggatgggttttttgttgttattatttaatgtacaaacacacacaattgaagctcccagggctatgccaccacctgccttcccctctgctcccaagcttagaacttgatccctgccacccacccaggaccatggcaaacagaccgacaagtcgcacggcccacggccccatctgagccttgtggggtgctggcgggggtggggggactgtgctccagccctcagctggcaggggccagggaggaagcaggctggcggcaggggcagcgtcctgtctgtcgtggaaacccccaactaccctgggctgggctgggggttacaggcacatgggcagggagtgatgaggtggcccgaggaggctcttgggctcaggagatggtagaagctgggacctcctgtccctggacacaccaggccactttgtgtttttgcagcccagccaggtggaggacaccctgtctggggaggagggtaacgaagaggaagaggaggaggaggcagctccagacccagctgctgctcctgaggatcccacggtgccccagctgacagaagccagccaggttttgagtgcctcagagattcggcaggtctgggcattgcccatggcacaagaatttcagccctaaacctaagagtctcaccctcctgccctacaccagccacgcccaggggcacctagagtcactcttgctctgttctcatcatgcgttacctccggcaaattgcttcttctctcggggctttgctttcccttcttgtaaaatcatccagtgttgctagcacctccctctacactgggccaggaggttaaggaggtaaagaaagaggctaggacgggcgcggtggctcacgcctgtaatcccagcactttgggaggcgaaggcagggggatcgcttgaggccaggagctggagacgagcctggccaacatggcaaaaccctgtctctactaaaaatacaaaaattagccgggtgtggtggtgtgcacctgtagtctcagctactcgggaggctgaggcacaagatttgcttgaacccagcaggcggaggttgcagtgagctgagattgtgtcactctgctccagcctgggtgacagagtgagactctgtctcaaaagaaaaaaaggaaagaaactaattcctacctagaaccagcccttgggaactgaggccaaagctggagaggggtgggcggatgagacggaggatcaggaggagggttcagcatctttcctattctctagcctctgggggcaagggtgaccaagcagaaagagtcctgagagtcctgacctgggttcaaatcctgtctctaccattcactacccatgcgagctttgggctagttgttccaccctccctgggcctcagtttcctcatctataagatgggaataacaacccctatctccgagggctatggctgatggcatgaaagtccctagaaacagcaaactgctctatcgcctgtaaagcactgtgctggatgcatgctagctgtccaagcccacccccaggatatggcaggagggcgcgaggagaactcctccattcacctccaaccctgtccccagctcagctttcacttcccaccaagagtcaccggccatccctggagtctggtcttctgcacgtcaagggacggtttcagcctgcagagcctgtaccggcggatggagggctgcagcgggccagtgctgctggtgctcagggaccaggacgggcaggtgagctgggcaggggcaccacccgaggctctgggggcaccccaccaggtactcatgggccctgtcccagggcagctcagggacaagcaggcagagtgacagactaagtcacctataatggacactgatgatggcaatgagacctgcccactcagagccattcccccatttatgcattcaacacatctacatggggcgccttctgtgtgccaggtgagaggtgggatagagcagaatcaacccagaagaggtcccagctctcttggagctaatggtctaataggggaagggtcagacattaagcaaataatcatttgactgtaaaactgcatcttcatcctcagaagcagaagaaactatgggggtgctgggcacggtggctcacacctgtaatcctagcactttgggaggctgaggcaggaggcttgagtccaggagatcaagaccagcctggacaacatagccagaccctgtctctaaaaaaacccaaaaccaaaaccaaaaaccaacaacaaccacaaaaaaattagccaggtgtggtggtgtatgcctatagtcccagcaactggggccaggggtgttgcagggtagttgaggcaggaggatcacttgagcctgcaaggctgaggctgcagtgagccatgatcacaccactgcactccagcctgggtgacagagtgaaaccctgtctgaaaaaaaaaaaaatagagatgtacactggcattaaactgatgtcagaaggaaacataccaaaatattaagagtggttatcttggggaagaaggagggggattaagagatggctttactttttttcttttgcttgtctattacttctacttttttctgtgattacttgtgtagaatatatatatacatatatatatatatatatatatatatatatactttttttttgagacggagtctcgctctgtcacccagattggagtgtagtggtgcaatcttggctcactgcaacctccacctcccaggttcaagcaattctcctaactcagcctcccaagtagctggaattacaagcacttgccaccacgcccggctaatttttgtatgtttagtagagacaggatttcactaagttggccagattggtcttgaactcctgacctcaggtgatcagcctgccccagcctcccccaaagtgctgggattacaggcatgagccatcacgctcggcccagaataagtatatttaagaaaaaggagggccctgacggcccagaggaggaaggcagcaggagttcttccttggggagcattaagggaaaggatgcataaggattcctgctcttgggtgtggagcccccatgccccagctctgccccagcttcccaggtgtcctctaggatgagcctgtattactaaacctgaagaatgagggttgccagaggacccctagctcccttccagctgcagactacaacttccactttccagatatttggagccttctcctcctcggctatccgactcagcaaaggcttctatggtactggcgagacattcctcttctccttctccccacagctgaaggtgatgttcccaaccttccatggggggagtggggcgtgtggcgagacaaagctcccggggtcccagtggctcccagctccatcctccacgatgggctgcctggtgtgccaccatcttcccacaggggaatgagcagggcagtggtgggcagagcatcccccttgacctgcctgtcctgcatttaaaacgtatttggtgggtctctggcaaccgctgactggctgagaggagggaggaccatgcttgccaggcacatgctgggaagacaagatggtccaaagtagacctgagggcgtggtggcaggacgacaaaggaggacacagccaatggcttctcaggaagtatgggggccaggcaccgtggctcatgcctgtaatcctactttgggaggccaacgaaggtggattgcttgagtccaggatttcaagacctacctaggcaacatagtgagacccccatctctacaaaaaatacgaaaattagccagacatggtagagtacacctgtagtcccagctacttgagaggctgatacgggaggatcgtttaagcccgggaggttgaggctgtggtgagccatgatcgcaccactgcattccagcctgggcaacagaggaagaccctgtctcaaaaaaaaaaaaaaagaaatatggggtgaggtcattgctggaggaaggtgaaggatccggtatcgcggtcatcacaggtgtgggaagggagggaagcctgctggagaacaccggagcagcagaagcgccgctgggccgtgtgagtggcggcttgggttgtgaggttaggacgccgccacttcagtgcatcggctgctcggcgcaggcctgcagaggggacagcagagagtggacagccagggttgggggttttgccaaactggcttaacaccggcagagagggaaaggaagttgaagggagtgaaaatacaacatggacaacggaacctaaactggaccaggaggggaggggagagaagcggggggcactgggggacaccaaggcaaaggtgggctcggcatgagaggtctccttgacatcaaaggcttggagcagtgacagcagttggacaatgtgttggaagacaggatacagtggacagagagagggacatttgaaataggctgtggaggagacacctgccatccctggtgaggacaaattctcagatgtgaacatggaagacagcggcagaaacccattctggggcagggcctggacgagtccacgtagacagtgaagtttaccagagagctgtgaagggtggtgggtggtgagtcagagctcaggtttctaattaatgatgagtgggagagtgacaggcacaagatgactggtatagtcaggtggctcgagctgcccaggagctgggtgagaataatagtcccaaacaccttccatccaaaggtttcctgcctctgggttatttattcactaaagctattgagcagtacctgcttggcacagagcatactacttttactactagtaaaaatggccaggccaagccctgtggttcatgcctataatcccagcacttagggaggcagaggcaggaggatcgcttgagcccaggagttcaagaccagcctggcaacagagcaagatgccattttccacaaaaaggaaaaaacaaaaacaaaacacggccaggtgcagtggctggctcacaactgtaatcccagcattttgcgggactgaggtgggaggattgcttgagctcaggagttcaagaccagcctgggcaacagagtgagatgctgtctcttaaaaaaaatttttttttaaattgttcagtggatgaagtcgttccaggtattctgctattagagatctctccaatgcacagactaagattccttcagacacatccagtcacacagtcatctggtctcatgacagggagttcacaaggagctatggactgctttgctaaaggcaaaatataccatatctattgcattgctgccatcagctggaggggctccatcgagcttcccaggatccaggaaagggtgagggaggcatggtgagccagtgctggtactactcatcaccacttgccttcctgaacttaagtctcagaattctaaaggtctagaattttccttccattgcactgacattagactattcctacattgactattcctagtagaatcttttgctggttcgtcctcatctccccagcctttcaacatcagagctcaggtgttggttctcatctcttctctagtgaccctcatttcttctgtgttctcgtccattcccacagctctccatgctgcctgtatgctgagggtctcttccctggactccaaactcacgtatatccaacaactgtccatcatctctccttgcatctcaaacatggcgtttctttttttttttttctgagacagagtctcactctgtcacccgggctggagggcagtagcgccatctcggctcaccacaacctccacctcctgggctcaattgatcctcctgcctcagcctcccaagtagctgggactccaggcacatgccaccatgcctggctgatttttgtattttttgtagagatgtggttttactatgttgcccaggctggttttgaactcctgagctcaagtgatctgccagcctccacctcccaaagtgctggtattacagacatgagtgctgcatctggccccaaacatggcatttccagcttaccatgtcccaaacggagctcctggctttcccgcacaaagcctcctcctcctgctatcttcccccatcaaagtgaatggcatctccatctcccgctgctgagacagaaaatcttgaagtcttccttaactcttgtctttcacaaccccacatctgagctgtcagcaaatcctgacagctctgccttctctctgtctatattcgggatccaccagtgccatgtcctttactgccatcttggttcaagccaccatcattacttgtgtgtccctgctatcacctcctaaaaggtctctcactgcctccacttcagtcagcacagtagctggagtgatccttttaaaagggaagccagggcagggctcagtggctcatgcctgtaatcccagcactttgggaggccgaggcaggtagatcacttgaggtcaggagtttgagacccatctggccaacacggtgaaaccccgtctctactaaaaatacaaaaattagccagacatggtggtatgcgccagtaatcccagctactcaggaggctgaggcatgagaatctcttgaacccgggaggtggaggttgcagtgagttgagatcgtgctgctgcactctagccagggtgacagagtgagactctgtcttaaacaaacaaacaaacaaacaaaaatggtgggggggaagctagaactcacagcatgtcactccttggcttcctctttcacttggagaagagccaaagtgtgtccaatgatctacaagtccctacaacttctggcctctctctctgaatggcatttcttgctacttttcctttctctcgctctgctccaaccacactggcctctgagctggtccttaaacatgcaagcctgctcctgcctcagggcctttgcacgtgctattctgcctagaatgtccctccactggatctctgcatggttcaattcccacctccttctatgttctgatgtcaccatctcagtgaagccttccctgactacctgatttaaaatggcaacacccagccaagtgtggtggctcacgtctgtaatcccagcactcgtgggactcccaaggcaggaggatcacttgaggccaggagttcaggatcagccctcacaacatagtgacgtctcatctctacaaaaagcaaaaaaatagctgggtgtggtggcacacacctgtagtcccagctacccctgaggctggggcaggaggatcgcttgagcccaggaatttgaggctgcagtgagctgtcattgctcatgccactgcattccaacctggacgacagagcaagaccctgtctctaaaaataaataaataaataaataaataaataaataaaatgacaacacccagccctaggaagcccttagtgtccttctccccctagcgtttgccatcatttaacacagaaattcttttttttttttttttttttgagacggagttttgctcttgttgcccaggctggagtgcagtggggcaatctcagctcactgcaacctctgcctcccaggttcaagcgattctcctgcctcagcctcccgagtagctgggattacaggcatgccaccacgcccagctaatttttgtatttttagtagagacagggtttcaccacgttggcgaggctggtcttgaactcctgacctcaggtgatccacctgccttggcctcccagagtgttgggattacaggcgtgagccaccgtgcccggccagagaacttcttttactttgttatctgccttctcccactagaaagtcagtccgttgaggcagaggtttttgtctattgtattcagcagtctacccagtgcctgaaaatagtgcctggtgcataagtgctttaaaaaaaaattgttgaatgaaatgagtaactttttcaggggagcctgtctttccagtctattgttatggaatctcatcttctaaaaaattggttaattcttggctatctctggccttctggcacttgtattcctcatgaattcggtagttcgttgattgctattccaaacggcaccatgaacttggtctcaattccttccacagcaacgtgtatcttactccttcaggtcaaaggtcatgtccttcgagaaagtagaggaggacttgaatgattctgtccccttgtggtcacttgttaatatgatctcatctctcctgagcataggacgtatcttttattagtctgttttccggctaaaaaccctttggttgctcacagcattttgggccactgattaaggcaataacatcctatcgttttgcagccctttaaaactattttgactcttgaataatttttgcattcaataaatatatatgttccaggaatacagccaggaagaagacaggccacacggaacttaacgtccttaatataaataaataaagaggaatgaaacagggtctgggaggaagggctacttcagatagggtggtccaggaaatttctgagatgatatttgggctgaaggatgagaggtgggccctctgaggatctaggggaagagcattctgggcagagggattctaggtcaggaatgggctttgggtgttccagggatggaaagactggtgtggctaatgtgtagtcaataagggggagaaggggccagagagaaaatcaggggttagagctggctgcactttttaagttttgacagtttttttgttgttttttagagttggggtcttgcgctgttatccacgctagagtgcagtggtgcgatcatagctcactgcagcctccactcctgggctcaagtgatccttccaccttagcctccccagtagctgggactataggtgcacaccactgtgaccagctaggtttaaaaatttgttttagggccgggcgcagtggctcgagcctgtaatcccagctctttgggaggccaaggcaggcggatcacgaggtcaatagattgagaccagcctgggcaacatggtgaaacctgtttctactaaaatacaaaaagttagccgggcgtggtggtgcgtgcctgtagtcccagccactcaggaggctgaggcaggggaatcgtttgaactcaggaggcggaggttgcagtgagccaagattgcgccactgcactccagcctggcaaaagagcgagactctgtctcaaaagagagagaaaaaaaattttttttagagataggggagggtcttactatgttgccttggttggtctagaactcctgacctcgaggaaactcctggcctcaagtgatcctcccgcctcagcctactgagtagctgggattacaagtgcacaccatcacacctagctagttaaaaaattgctgggattacaggcatgagccactgcgccagtcccaggctgcacttctggccattgttaaggagttgaattttatccccattgcaatgggaagccattggaggacttaggcagaggagagataacatctgatttggacgtagaacagatcacgcagattgcagtgtgggtatggctgtaggtacagacagtggatgcagagggaccagctgggaggctgtgatccaggcagaggacgggatagaaatggcggcaggcccgctgtgtctagagctgcgaggcttgttgatgagctggatgtgaggcagcactgaagagcaggcgggctggtgttgtccgggtgagagttagttagaagggcagtatcagttcccactcctggcctggactgctcccctcctccctccagctttggaagcaggaagcctcaggggtcgttgtcctattctagaacaaagaggcttctaggctgtaggaattcaaactagagggcatgcggtggtgactccaaggagactgagaagataaaccccaagatccctgagcccggagtcccacctgcggctcggttggggcctggatgctgttcccgccacaacactgccatccagtggttcggggtcaaactgcaagggcgggactcgctcgcttagtaacctgagcctttccctatgtatcacccaggtctttaagtggactggaagcaactctttctttgtgaagggagacttggattcactgatgatgggcagtggcaggtgagtgtctcagtcttcccgagtcttggggcggtctgtgttctggtccctttccctctgccgaactgctgggctaggctgcccttgatgcaatggcgaggctagtggggaactctcaggccgttcccctcattgctcagcctcccagccaaccccctcaacctcacgctaagccagtattaaggagaaaggatgcatgagtgcccccactgaagtgttacagctggtgacagtttagtctgaatgtatgcaactttgggaaaagaattccacatggttggatgagactagcgtcaagagatgagtgtgcctcgtttttccaccagcccaggaattgcaggggacataactcattgcaggaacctccctcggtgaggacggggtagagagaggtaggaaaaaaaagttgatctcatcctggtgtgaccttcacattcagggggcatgcgtcttatcctgagggcggggatgagagcattgcttgattagtaccaggcaaattctttgctctcccaactgcctgaaaagcctccactgaggggcagcttggcacagaacacatcagccattgctgatctgcaggaattcacttcctggtttcagccgaggttttctgtcaaataaggggattagaatggacgctctgaagcatttgggctctcagagtttgcaccctgagatgtactagctttggttaaagaattgccattttgttttttttgagacagagtctcgctctgtcgcccaggctggagtgcagtggtgtgatctcagctcaccacaccctccgactcctgggttcaagtgattctcctgcctcagcgtctcgagtagctgggacaacagttgcccaccaccacgtccggctaatttttgtattaagaattgctatcttggaccgagcgtggtggcttgtgcctgtaatcccagcactttgggaggccgaggtgggcggatcacgaggtcaggagatcgagaccgtcctggctaacatggtgaaaccccatctctactaaaaatacaaaaaatcagccaggcgtggtggtgggcacccgtagtcccagctactcgggaggctgaggcaggagaatggtgtgaacccgggaggtggagcttgcagtgagccaagatcgcgccattgcactccaggctgggcgacagagcaagactcctatcaaaaaaaaaaaaaaaaaaaaaaaattgccatcttgaccaggcgcagtggctcacacctgtaatcccagcactttgggaggccaaggcaggcagatcgcttgaggtcaggagttcaagaccagcctggccaacatagcaaaaccccatctctactaaacatacaaaaattagccaggcatagtggtgggcggcctgtaataccagctactagggaggctgaggtaggaaaattgcttgaacccgggaggtggaggttgtggtgagccagggtcgtgccactgcactccagcctgggtgacaaagcaagactccgtttcaataaataaataaataaataaataaacaaataaataaataaagctcttaaccccatggggaacaatgtgctgagtccccaataattcagtataaattgctttaaggggcgataagacaggtgaaactgggctgccgtcctggcatggccaagagctgatgctggtggcagagcctgggggtttcagcacacaggagtgagccgcaccaagactgtcctcttctctctagtggccggtttgggctgtggttggatggagacttgttccgcgggggaagctccccttgcccgaccttcaacaacgaggtgctggcccggcaggagcagttctgcatccaggagctggaggcttggcttctcagctgacagccctgcggcaacaggtactcagccctgctcatgatgccacccaggccttcctgacacacagcagcctgtgctgtttgaaacacagatggtgaagggccctagagttggccgaggctgctggccagcctccttgtggcctggggacccaagatacaggtgggggcaggcactgctcttttgcagaggtgactttgaaggattaaaagacgcttacaccttactcaagcagcacagagaccctaagctaacagggtcttagaaaactcagaaaaatccacatctcttccccgctagtgcctgcctcctggcaaagggaagatttttcactatgctgttcctcgccagctactgaacgaggaaaaccaacctcatgaacattatcattttagaggttctacaactgattcatgtttattgtagaaaaaccagaagacgttaaaaaaattaaaattgcctaaaattcaaccccccccaactcttaacattttcatgtatatccttccagacaatgttccatgaatgtgtgtgtgtgtgtgtgtgtatacttacaaaaacaggattctactctgtatgtgtggaaatgattttaacttacagaatattgtcaaaccttagaaacctgggcttgagcactggaactaataaatactgtagcagcgtcgttcctcctctggcctgctgcagaatgttgaggcctttttgtctgccaccagtgccaggtgcttgtgagtctgttatttaatttcacaatgaaggtatgaaaggagtaaatgagtaatatgcatttttggacaaagaggtcgaaacctttgtggaacacaactttcaagatggagatatatattcacgaagctttattgcagctgtttcccttacccagttgaagtggccagtcattttaatttgcagttctatttacattcccaaggtaaccacgttcagtaactctctagaggctaagctgttaaaatttccatttttatacaaatagcaaagatatttctttctctttctttctttctttctttcttttctttctctctttccttccttccttccctccttccttccttcctttctttctttttgtttgagacagagtttcgctcttgaccccgaggctggagtgcagtggcctgatcttggctcactgcaacctctgcctcccggattcaagcgattctcctgcctcagcctcccgagtagctgggattacaagcacacaccaccacgcccggctaatttcacccggctaatttttgtatttttagtagagactgggtttcgccatgctagccaggctggtctcaactctttacctcaagtgatccgcccaccttggcctcccaaagtgctgggattacaggcatgaccacctcgcctggccaagaaaaatgtaaccttgtaaatagcacagcgttctcataatggaaacagttgcaaagaacataaagtacagctgcgttacatgtaacaaaagatgcaaacaaaatagattcaagttgttttgcagacagcacaatgatacaatattaggactacagaatctcagagtaaaccacaatgatttaaaggtaagatacacagaaataaaatgattttaacagaaaaatatgacattcctgaccttaggtctgggcacatgatgtctgacccctatagaggcaccttggctaaaatgggaatgacctagtgccatggctgacctcacttgtgcgttgctgagcccatatgtgaacaaatccccttgatacagcaccatggtaggcatgagaggagaagtgttttaactattctcttatgaattgtaaccaacccttattatctactgatggatggacagggggtggggtgatcatacaggatggcagacattccaagtactcttcaccccagtgtggacggaacagaatctggctacacggtggccagtgatggactgctgggaaatctgctggcctgtggtctgagttcccctacttgctcaggctgcccctcactcccagtgtgccagggaggcttagtccggggagcatcagagcagaagacattcggggctcatggctcccatccccactggcctgtatcttcagcaccctctggccaccaccagctttggctctaactgcagactttgttcttggtgaattgctatagaactgggaatgaggtgtgccctgggcacaggggcactgccccaccaaggtggtgcccactccactgctgggaaaacgaagttacctagcggagcctggagcccactgggtggtcactaatttcagcacaggcagtgcagtgtttgtgcttttttttttggagatggagtctcactctgtcacccaggctggagtgcaatggcgtgatctaggctcactgcaacctccgcctcccaggttcgagcaatcctcctgcctcagcctcccaagtagctgggactacaggcacacgccgccacgcctggctagtgtttgctcttaaatacacaaaatgcactgaaccagcaaaaacaaagtcccaggtctgaggagctctgaggatgatgcctgtgatggcctctggccagctctccaggatactgagagagcaggtcaggggaggccttctccaggctgggcagtgggaaggccctctggaccgggggagtgagtattcaggggacaaaggcactacccgggtctggagccgccacggagccagggcacagcctagtttgggggattcctctgtcactggggtaggatctcccaacaagaggcggctttatgttccactcacgaagaggccagagctctcagatcttccccaaaacctaatcaggcctctcaccagcgtgttggaggccactcctggccatcatctccaactctttaccccaacctggcaccttgtagggggctagaagggtgaggggaggtgtctttcacttatgcttaggtcactcttagaggactatcctcaaacttgaggtgacagggaactcttcacgggggcaggatttgatgttttgtttttagccatgtttgtcaatgacaatgtcaatttctagttccaatttgtacccttgtctcatttctacattaaaaacaaaaaacaatcatctgtcataaaagttcagagtaagctgggtgtggtggcacatgactttagtcccagctacttggggggctgaggcaggagggtcgcttgagcccaggaaagttcgagtccaagctgggcaacagagcaaaaccttgtctcttaaaaaagaaaaaaaatagagttcagaatagataaaagagttgttattctaagaaaatagactactgaaggagaaaggctttaataatattaaaaataggcaaggtaatgcttttcatagtatagtaagatttgcctaataccatcttatttctttgattaaaagttacttagcttcagcatgcgtgtacattcaaaatacaaaattaaagcatgagttgtcattaatttgcagaattctatgattgaagcctctaaatgaattgtgcaggagagggagtttgtaaacaactgactacagacattcacattgggtcatctttaaaaagctggactctgcttttggatgcttctcggaggcgagttggattttggactgaagtactgtcgttccattcctttttttgaggtgttatgagtggggctataacatcgccatcctattaggaagagagagaaaaacaggcaatagagaaaagccagtttccatcatcttatttctgagtgaaagtctcaagtgcgcacatcctcatcttgcatatagattgcttctagctgtcctcaatccagggaaactccaaattacatatgccctgtgcttggggcaaattagaaacactacagtcttacgcaggaagagccttcatgaaaacagccactggcctctgcagagatgactgggagcagcataccactgcccacctctatggcctccttcacacaccttcacggagcacaaactctgtcctgttttcccaggagaaagacgggatgcactgaacccctagcttctctctcgcctggtcccctctgcaataaaaggcccaggtctacaagatggcaaagaaggggaggaagaacagtatgtacctgcagaatttaaatttttctctgcatcaaagctctaacgttggtcccatcagcataggctccagccaaagaagctcctccacccaaaataagggagagatccaaagggaggcgatacaatgacgtgaaaccatagaggtaagaagcaaggcctcctaatacttgactctatgctaaactgttctgaacttgtgggtagatcttctttggttacaagatgatgcacgatcttggagagcctctgttgtaccaggaatacaatgctggtgggaggattcgtgctcctcatctgcttatttgctctcagatccattcttcactcttcctctccctactctgtctcacaggagctactccggtaaattacatttctcagctcccatgcctgttggtttccagttagatttggtcagtgggaggctctggtgggagactggaggtgagaagagggcagagaagtcaggttttttctctccctacctcctctggcacgagcggcagtggcagtgactattctgtggttctagcttttgcaggtggccccagctcctggactcccacctgctcccttggtctctcctatcctagaggtggtagcagcttcctgctgttgaatcactgtcctctatgctcatttagctctgccaaaacttttgtatctcacccccatgttaaattttttctgttgaactacactggatctgacttgatagaactattaaaaatagtttttaaaaaatgtgttattatttttttttgagatggaattttgctctgtcacccatgctggagtgcagtggcacaattttagctcactgcaacctccacctccagggttcaagcgattctcccgcctcagcctcccaagtagctgggattataggtgtgcatcaccatggctaatttttgtatttttagtagagatggggtttcactatgttggccaggatggtctcgaactcctgacctcagtaaaggcaatcatttaggccaggcgtggtggttcatgcctgtaatcccaacactttgggaggccaaagcaggtggatcacttgaggtcgggagttcaagaccagcctgggcaacatggtgagaccccgtctttactaaaaatacaaaaattagccgggcatggtggcacgtgcctgtagtcccagctactcaggaggcggaggcaggagaatcacttcaacccgggaggtggaggttgcagtgagctgaaactgtgccactgcactccagcctgggcaacagagcaagactctgtctcaaaaaaaagtcatcctattgtcatgatacttgtacttaaaggcctatctcaaaatcaacagtatttatttgtctttaaactcatctctatttctacccagcttgctttctttctttctttttttgagacagcatcttgctctatcaaccaggctggagtgtagtggtgtgatcatagctcattgcagcctcagactcctaggctcaagcaatcctcccacctcaacctcccaaagtgctaggattacagatatgagccaccatgcctagcatatagccaactttttaatttctactcattctactttcagttctagtgaattttataaatgtaaacaaatacgtcactttcctgcttaaaacccttcagtgtcaatgctccctactgctcttggctgacaggactttgataaagccccagacacctccacactctatgctccttcctgaaatgcatcatgttctttctcatcttccgacctaaccctgtggtgtctatgcctcaacccctcccctaccaccacctcctgctgccagcccttaacccagacaactcctcactcaaccttcaggtctcagtttataagcccttctttaaataagcttttcctgaccaaccaagaccagctaaatcctccttgtttttcctcttctaagactgtgtactcaccctatacccaaagtacttaccatgctcctataattattaacttatggagaaaaattaataataattattattatccccaactagattattatccccaacctgaatgggatccatgggttattaggaactgtctatcttaggtactgttccaggtacctaacacagggcatggcaaaatactcactccgtgagtgaatgtaccaaatttatagtagttatcacgacacagccaaactttaatagcctctcttgactctctatttccagactctccaagttccagtctatctgcagctagagttttcagtgatttagtttcagtgatttagtttcacagtacctaggacagacatacagttggccctctgcatccatgggcagattcaaccaactgtagatagaaaatatgaagggggaaaaatggatggctgtgtctatactaagcatgtacagaatttcttcttgtcatgattccctaaacaatacagtattaacaactatttacatagatttacattgtagtaggttttataagtaatctagagatatttaaagtataaaggaggatatgtataggtcatatgcaaacactataccattttatataagggacttgagcatctgtggatttttcttttcttttcttttctttttgagacagagtctcgctctgtcacccaggctggagtgcagtcgccggctaattttttgtatttttagtagagacggggtttcacagtattagccaggatagtcttgatctcctgacctcgtgatccgcccacctcggcctcccaaaagtgctgggattacaggcatgagccaccgcgcccagcctatccatggatttttctatctgtggggtctgtgggggtcctggaactagttccccacagacaccaagggacaattctactcttattcccacgggtgtcactctagttggagatgacacacattcaggtagatcatacagtgcatggtaattcttgaatatgctcaatgattccctccccactgtacagagaaaaaaatctcttagccaattatccaaggttctcaataatctagtccactcttcccatttaacctctccacacttaacagtaagaactttctggctgggcatggtggctcacacctgtaatcccagcactttggggggccgaggtgggcggatcacgaggtcaggagatagagaccatcctggccaacataatgaaaccccatctctactaaaatacaaaaatttagccaggcattgtggcacatgcctgtaatcccagctactcaggaggctgaggcaggggaatcgcttgaacctgggaggcagaggttgcagtgagccaagatcgtgccactgcactctaacctgggtgacaaagcaagactccatctcaaaaaaatgaatgaattaattaattaaaaaaaaaaagaattttctaccctgacaggtctcctcatggtcccctaaacagtctcagctcattccagcttcatgcctttgtgctcctcccactgccaaatataccctgcattctccctgctactcatccaaacacaaccctgccttctagatctagcagatcctgccccttcaccaggcttctcccagagatctcccaactctctgaatcctcagagatcttacctggatcatgccttgtggcacttgataaagcaccgacatcctgagctacgctttcatgtctcaccctatcctttgttccctttagcacctgacacacagggaggtgtgagggagagttctagactaggcagtaaagcactgttgccctgcatgccaatcatattcattcattcattcattcaataaatgccaactggccacattctctgtgcagacacctaccatgtgtaggtcagtaagagacaattttaacaaccttctctacagggttggcaactgtggcttggctcctcttccctctactcacattctagataatttaaatagctaactaatatactgaagtaacgaggtttagaaacatgaagtctattatcaattttatgttaaacaagttaactactcagctttggtaacctctgaaagatggagacactatgaataaccttccagggccactggtgaacaacattagaaagcattatttacatgttcacatttttattattaggacaataatgctaaacagtatccattcccaactcctgtaggaagaaatcactggctgacacagattcagacattttaaaaggaaagaaagtgaaagaccttattttcaaaaccataaccaaatgactataacttaaatgggaacttttcagcagatagacttacttttggtttttacttaaaaataaaaaattgtgcaaagtttgtgagtaacaggccacctacctgcggcttggtgaaatttctgtctgcacaccactgaacaaaatattgtcttgcggcatacaaactctttctgtccaccttcttacaatatactcgaatcagctgctctgcaaatttctctggcagaagttgtgaaacctttttaaaatgaagagatttcactatcaccttgaagtcacacattggagatatcagctggtccctaggctcctaactattcctttttttttgagacaagatctccctgtcacccaggctggagtgcagtggcacaatcacagctcactgaagccttgacctcccaggcacaagtgatcctcccacctcagcctcctaagtagttggaactacaggcatgagctaccatgcctaagttttttattttttgtagagatggggtctcgctttgttggccaggctgatcttaagctcttcgtctcaagtgatcgtcctgcttcagcctcccaaaacactgggattacaggtatgagctactgtgccaggcccactttaattgtaaagatatgccttaaaacctaatttgcatataaaatgctaatttactataaagatttgctacatgccactatagtatatttgttttgcctaagtagttacctggtttttagtaatcctgattgctctgttgggggcagtcttacaatagaagctaacatgatcaattggattcttttcttgcattccataatccatgttgataacctaaataaaagcaattcacaagtaatcatatagcaagcaggagaactgaactcagggctgtaggagcataacaagaaatggaacagaggccgggcgcagtagctcatgcctataatcccagcactttgggaggccaaggtgggtgaatcacgaggtcaggagttcgagaccagcctggccaacatagtgaaaccccacctctactaaaagtacaaaaattagctgggcgtggtggcatgcgcctgtaaccccagttactcgggagactgaggcaggagaattgtttgaacctgggagatggaggttgcagtgagccgagatcgcaccactgcactccagcctggcgacagagtgagactctgactcaaaaaaaaaaaaaaaaaaaaagaaagaaagaaatggaacagagccttctggggatttggaaataagaatgttgatgtgactcatggtggaataaaaataactggttcgtgaccactcttagggatttggtattgaaatctgggaagaatgggaaatgcacttgtgtgtttgatctaagtgtggtgtaaactcaatccctgctatgtgacagacacagatagacactagaggtacaacaaggacactttaaaataaaatcccaggccggacacagtggctcacttgagaccaggagttcgagaccaccctggtcaacatggtgaaaccctgtctctaccaaaaatactaaaaaaaaaaaaaaaaaaaaattagccagacgtggtgttgtgcacctgtggttcaagctactcgggaggctgaggcacaagaattggttgaacctggcaggcggaggttgcagtgagttgagattgcgccactgcactccagcctaggcaacagagcaagactctgcctccaaaaataaataagtaaagaaaatcctagcccccacaaaccaggcagccctagattgaaattcaacaaataattataaaagtattcaaccacagttgaaaagcaaagggtgctttgaaatgttctaacaggttacctgatgtagcctagggtgcccggagaatgaccggaaacattttcctgggaaagtgactttactaagtgagcaagaaacaaacaggcttaggtgggaagaaaaagaattgcaggcagaggaaacagctcagaggcagagaggactgaaactgtctcctggatttagcaactctgaagtcaccggtgattctggagagagtacagtgatggcaacagaaaaaaaggttcaggagaaaatgagaaacaaaaatgtaagaggcgcaatggctcacgcctgtaatcccagcactttgggaggccgaagccagcggatcacgaggtcaggagatcaagaccagcctgtccaatatggtgaaaccccatctcaactaaaaatacaaaaattagccagatgtggtggcaggcgcctgtagtcccggctactcaggaggctgaggcaggagaatcgcttgaacccaggagctggaggttgcagtgagccgagatcgtgccaccgtactccaacctgggtgacacagtgagactccgtctcaaaaaaaaaaaaaaaatgtaagagaaggcaactcttagaactttggctgttcagaggaggcaagatgttaaagaaaagaaaattacagctagataggaggagtaagttctagggttctatagtactgtaggatgactacgactatagttaacagtaatttccttttttttgacacagagccttgctctgttgcccaggctggactgcagtggcacaatctcggcacactgcaacctctgcctcccaggttcaagtgattctcctgcctcagcctcctaagtagctgggattacaggtatgcaccaccacacccagctaatttttgtatttttagtagagacggggtttcaccatgttgaccaggctggtctcaaacttctggcctcaagtgatccacctgcctcagcctcccaaagtgctgggattacaggcatgagccaccggggccggcctagttaacagtaatctattacatagtttttttgtttttttttgatatggagtttctgtgtcgccaggctggaatgcagtggctcgctctcggctcactgcaacctctgcctcctgggttcaagcgattttcctgcctcagcctcccaagtagctaggatgacaggtgtgtgccatcatgcctggctcactttttttttttttaattttagtagagacagggtttcaccatgttggccaggatggtctcgatctcctgaccttgtgatctgcccgccttggcctcccaaagtgctgggattacaggcatgagccaccgtgcccggcctattacatagttttaaatagcttgaaggagaatattgaatgttcccaacacagagaaatgataaatgtttgagatgatgggtatgctaactaccctgatctgacatttatatacactatgtaccccatgaaaatagacagttatcatttatcaatttaaaaaatacataaaataaaaacataaaggaaaaaaaagacagcaagaaagaagtatctggagaggaatctggtgccttagaaaggtaagggaagatgagtctgaccctgaaaaagaggagaggggaagagcagtgtggtgttcatgattttcttgagacaggctcttgctctgttgcctaggctggagtgcagtggtgcgatctcagctcactgcaacctccacctcctgggctcaagcgatcttcccacctcagcctcccgagtagctgggactacaggcatgcaccaccacacctggataatttttgtgtttttggtacggatggggttttgctgcagcaaggcatgatcatgccactgcacttcagcctggggcacagagagagaccctgtctcaagataaacaaaagtttaaactaacattggctgggtgcagtggctcatgcctataatcccagcacttcaggaggctaaggcagcaagattgcttgaggccaggagtttgagaccagcctgggcagcatggtgagaccctatctatacaaaaaacttaaaaattagctgggcatggtggcacatgtctgtagtcctagctactcaggaggctgaggtgggaggatcacttgagcccaggagtttgaggttataatgagctgtgattacatcactgcactccagcctgggcaacagagtgagaccttgtctctaaaaaataaataaataattaacactaaatacaataaaaaatgaagttattcagttacagcaaccacatgttaagtgctcaacagctgcatgcagctagtgactatggaaagggacatcactgaccaagaatatctctgtcactgcagaaagttctatgggacaacacttctctagaacacaagtagaattaccctaagcctttgacaagaacaaagctgtttccccactataagaatgggaatactgaatacagtgacagatggaggaaggcttgtttctttggtgagaaaggtctaaggagttgctacctaatggcctatagtttatcttggaaataggagccaaaggttgggttactcatgaggatgaatacagctggaggtgggaagcatggttggagttctgagaggagggaggacagtttgaaatgatgatgatgattattagtagtagtattttttgagatgagggtcttgctctgttgcccaggctggagagcagtggcatgatcttggctcactgcaacctccgcctcccaggttcaagtgattctcctgcctcagcctccttgagtagctgagattatcagcacccaccaccatccctggctaatttttgtatttttagtagagatggggttttgccatgttggccaggctggtcccgaactcctgacctcaggtgatcgtccgcctcggcctcccaaagtgctgggattgcaggcgtgagccactgtgcctggactgaaatgattattagagactgggagaatcacactaagcctgccagaaggcccagcttagtttcgtgaccggaaatttatagatatgcctgtatagtgatggtatccaggagcatttatgtgtccaggtatgggtgtggagatgtttagatttgattcatctaggttgtttggccttctgctaggtagatgcaaagaaggaaaagagagttgagggtaactgcagaaaatgagtgaattactgtatcacgttatctaagatacttttttttttttgagatggagtctcactctgtcgcccaggctggaatgcagtggtgtgatctcggctcactgcaacctctgccttctgggttcaagcaattctcctgcctcagcttcccaagtaactgggattataggcgcgcaccaccacacctggctgattttttgtatttttagtagagatggggtttcgccgtgttgggcaggatggtctcaacctcctgacttcaagtgattcactcgccttggcctcccaaagtactgggattataggcgtgagccacctcactcggcctacacgtggagagaaatgaagatagaaggccactgacaagctcgaagaaagtgaggacacaataaactagagggcctgatgagctaggaaaacatggatgaggaagaaaggggtttgtggacagagaaaagtatgttaaactagtgattttacagggagggcagttttgaatgttgataaggtccagggtgtaatctgctgagactattggcctgaggtgcagtgctgtctcgctctgttgcccaggctggagtgcagtggcgtgatctcggctcactgcaacctccgcctcccaggttcaagcgattctcctgccacagcctcctgagtagctgggactacaggcacacaccaccatacccagctaatttttgtatttttagtagtgatgggggtttcaccatgttggccaggatggtctcaatctcctgactttgtgatcgacccgcctcggcttcccaaagtgctaggattacaggcatgagccaccgtgcccagcaattttttttttctttttcttttttttttttggagacagtcttactctgctgcccaggctggagtgcagtggcatggtctcggctcactgcaacctctgcctcctgggttcaagcaatcctcctgcctcagcctcccgagtagctgggactacaggcgcaaaccaccaagcccggctaatttttttgtatttttactagaaatggggttttgccttgttggccaggctggttttgaactcctgactcaggtgatccacccacctctgcctcccaaagttctgggattacaggcgtgagccaccgtgcctggccccacaactttttcctctgtgcttgtatgcaggcaataaaaaaaattaaaatgtattacttgtgtaattaaaaatttttaattaatatagacaatgtaatcacatgaccacaattatattaaaaataatggcaaaacatcatgaacaaaatgtttttgtggttaataatattggttctctttgtgagggcacatcatctttctgtatttttctaatttgctaaaatgaacatgtactacttttataatggtgggtgctttatctttaaaacgtattcactcagtttattactgggctaattacttacatccactataaaatcttcagccttcagtttcacgtctagcaatactttgggtttagcactggcaacctcttttggaagagattcatagtcctcctggaaaacacaagactccccatgttagaatccatttttcatcaagtctttgagccacaaacaggttctctttatgaaaatggcacctaactaagaaaaacgattagagatatccttaacaaatatagctcctaccaatgtcactcgttaaacaaagagagcatttttgtaaaaaattgtaaaaagtggccaggcgcagtggctcacgtctataatcccagcactttgggaggcccaggtgggcggatcatgaggtcgggagttcgagaccagcctgaccgacatggtgaaaccccgtctctactaaaaatacaaaaattagctgggcgtggtggcgggtgcctgtaatcccaactactcgggaggcttaggctggagaattgcttgaatccgggaggtggaggttgcagtgagctgagatcgcgccactgcactctaacctgggtgacagagcgagactctgtctaaaaacaaacaaacaaacaaacaaaattcacattttgaaaaaaaaaaagtgacattaacctattagtacaacaagaggaagtaaagtataacccaagaaattattgaggtaggatgtggttataagtatgacttgtgttacggctttctggcaaacagaaaactcttcaacaagtaggaggtgaaaatagatatttgagctaaagaagacaggtatgtgccatctgggagactgatatcctgtgaaggaaccaagtcattacaacaggtcaccacagcctcaatgaagctcatgcaggcactttcttttgaggttcctttcccttatattcattttctcatgtctgaatctagccaaaattggagacccactctcacttcctggatgagatcaaagatttggagttaagttagacctggcttttgaatcctggctaaatatgctttcatgagcaagttatttaatctcagtgaagcctcagtttctctatctgtaaaacaggcctaagacccctgcactactgtgaagattaaatgagaataaacgtaaagcacttagtacagagtcatagtatcacgataggttagtggtctcctcttggaggacagagataacctttcactaatggaaagatgcctgataactcacccttttaatctttatttgtcctgttggctgcgtctcacccacatacttgaatagattacggtattcaatttgttttaaaatctctcgtgcgtctttcaatttgggatcagtagagtataaaatctccagaaaaatgttatctgccaatttaatgacatttcagttatattaaaataaaaacacagagttaaagaattatatagtgctattctattgaaatgatcttaacaggcagttcgcaaatgtaggtacattattattttagcaatgtgagaaaaatttttaaaagatttaagtgaaaaaaccttttaaaactgttccagtcggccagtcatagtggctcatgcctgcaatcccagcactctgagaggccgaggcgggcggatcacttgaggtaaggagttcaagaccagcctgtccaacatggtgaaatcctgtctctactaacaatacaaaaaaattagctgggtgtagtggcgggcgcctgtaatcccagctactcaggaggctgaggcaggagaattgcttgaccccggaaagtggaggttacggtgagccaagattgtgccattgcactcaagcctgggcaacaagagcgagagactgtctcaaaaaaaaaaaaaagttcctgtcaatgtcttggatttacttccaggtaatccagagagtggggaaggatagagagaaataagactgcattggagttgatgactgctgagctgggtgatgggcacataaaggtgtatggatttattgttgacatgttttattttgtctttaagaaagaatggtggctaggcgctgtggctcacacctgtgatcccagcaatttgggaggccaaggcaggtggatcacctgaggtcaggagcttgagaccagcctggccaacatggcaaaaccctgcctctaccaaaaatacaaaaattagccgggcatggcggtgcatgcctgtggtcccaactactcaggaggttgaggcaggagaatcgcttgaaccctggaggtggaggttgcagtgagccgagatggcgccactgcactcccacctgggtgacagagtgacactatctaaaaaataaaaataataaaaagagaacggtcctgaagtatttacaagcaaaattatgtctaggatctgcttctaaattgtccagtgtttgacaagagtgggtagatgaagcaaaactgccatgtgttgataactgttgaagctaagtgacaggtacatggctttgtaaatttctataataataaaacaatgattttttaatgtcccattcgatgatgagagtagaagaaatgtttttcctttctttcattttctcccaatttttattttgaaaaatttcaaaataaaatatccttcacttaaattcaacaattgttaatgtttttctgcatgcgctttctccatatatatatatctgtgcaatttttttttttttgagacagagtcttgctttgtcacccaagttggagtgcggtggcgtgatcttggctcactgcaacctctacctcctaggttcaagtgattctcgtgcctcagcctcctgagtagctggaactacaggtacatgccaccacacccagctaatttttgtattttcagtagagattgggtttccccatgttggccaggctggtctcgaactcctggcctcaagtgatccacccgcctcagcctcccaaagtgctgggattccaggtatgagccactgcacctggcctttttttttttttttaaggagacaaggtcaggttctgtggcctaggctgaagtgcagtggcgcgatcatagttcactgcagcatcaaagtcctgtgctcaagcaatcctcctgcctcagcccttgagcagctgtgactacagacgtacaccaccatgcctggctaaatttttttttgtttgtttttgagacagggtctcgctctgttgtcaggctggagtgaagtggcacgtgatcatggctcactgcatcctcgacctcctggactcaggcaatcctcacgcctcagcctcctgagtaactgggactataggcacatgccaccatgcccagctaaaccaaaagctagtttaaatgtaaatataatttgaaaaaattaatcttcctgccttagtctcttgaacagctgggactaaaggcacatgccgccacacctggataaagatgactttttttttttttttttttttagacagactcaccctgttacccaggctggagtgcaatggtgcgatctcagctcactgcaacctccgcctcctgggtgcaaatgattctcctgcctcagcctccagagtagctgggattacaggcgccaggctggtctcgaactcctgacctcgtatctgcccacttcggcctcccaaagtgctgggattacaggcgtaagccaccatgcctggctgactttttaaaatatggcatcacttgcattattatgaatgaaaattaaaagtaaatatcttcagcttgttcaattttttttttaacttttattttacttatttatttattttatttttgagaaggagtcttgctctgtcatccaggctggaatacagtgatgccatctcagctaattgcagcctccgcctcctgggttcaattgattctcgtgcctcagtctccgagtagctgggactacaggcacccgccagcacgcccagctaatactttgtatttttagtagagacagggtttcaccatgttggtcaggctggtcttgaactcctgaactcaagtgatccacctgcctcagcctcccaaggtgttgggattataggcgtgagccaccctgcctagccttacatgtatatttttaaagaacaatgtatatagttcttgtaatttaatttttaaattttttctctatcattattattattatttgatacagggtctcgctctgttacccaggctggacttcagtggtgcaatcttggctcactgcaaccccggcctcctgggctccagtgatccccccaacctcagcatcctgagtagctgggactacaggcacgcaccaccagggctaatttttaaattttttagaaacagggtttcaccatgttgcccaggctggtctcaaactcctgggctcaagcgatccaactgccttggtttcccagagtgctgggattataggcacgagccaccttgtctggcctattatttatcttttgattgaatttactgaaaggtgtaatgtgaagtctgtcaagttgaataataaaaatttgggcttgtattttacatgccttttccccccatttcatttttctagtaattcatttttatcatactttacagaaatatcaatctgcaaggggttggtaattttaaaaactggttcttcaaacacagtttaggaggagctagtttaggtttcattctgtcagtgtgcagcaaatagaatccagctgtggtagaacggcagcactctcggcaggaagctacggtagagtgattaggctgtgtcttaggtcacttggcttctgttgtttttctccattttcagagcctccagcctttccacggattctgtaagctatgtgattgctttccaattttatttttatttatttatttatttttatttattcatttttgagacagaatcttgctctgttgcctaggctggagcgcagtggtgcgatctctgctcaccgcaacctctgcctcctgggttcaagcgattctcctgcctcagcctcctgagtagctgagattacaggtgcgtgccaccacgcctggctcatttttgtatttttagtagagacggggttttacaattttggacaggatggtctcgaactcctgacctcaggtaatctgcctgccttggcctcccaaagtgctgggattacaggcgtaagccaccgtgcccggcccaattttatttttagttaaacagtttcataatttgtaactaagaactctgactggtgtacactttttgttctacttcttttgctttatctcagtcaatactttcccacattaaagaaccagctgtggctgggcgcggtggctcacacctgtaatgccagcgctttgggaggccgaggcagatggatcatctgagatcaggagttccagaccagcctggctgacatggtgaaaccccgtctctagtaaaaatacaaaaaaattagctgggcatggtggtgggcgcctgtaatcccagctactcaggaggctgaggcaggagaatcgcttgaactcaggaggcggaggttgcagtgagccgagatcgtgccattgcattacagcctgggctacaagagcaaaactctgtccacccccctccaaaaaaaaaaaaaaaaaaaaaaaagaaccacctttaccctttacctctctttcctcctttccacactaagctgcagattttgtttctgcagaagtgtggacagatgttcctggcatcttgtgtttttataatgaaaataatgttaaatggccaagtcagttttttggtgttcaatattagtccaggtatgagttaaataatgacaagtctgggcaacataatgggaccctgtctctacaaaaattaaaaaaattactcaggtgtggccgggcggtgtctcacgcctgtaatcccagcactttcggaggctgaggcaggcggatcatgaggtcaggagatcgagaccatcctggctaacaaggtgaaaccccatctctactaaaaatacaaaaattagccaggtgtggtggcgggcgcctgtagtcccagctactcgggaggctgaggcaggagaatggtgtgaacccgggaggcagagcttgtagtgagccgagattgtgccactgcactccagcctgggcgacagagcaagactccgtatcaaaaaaaaaaaaaaaaattcccaggtgtggtggcacatgcctatagtcccaagtagccaaatcagctacttggctgaggctgaggcaagaggatcacttgagctccggaggttgaggctgcaataagctgtgatggcaccactgcactccagcctggatgacagaataaaatcttgtctgaaaataaataaataaaaaaaaattaaatttaaaagttaaataatgggccgggcgtagtggctcacgtctgtaatcctagcactctgggagatggaggcgggtggatcacatgaggtcaggagttcgagaagaccctggccaatatggtaaaaccctgtctctactaaaaatacaaaaattagctgggcatggtggggcatgcctataatctcagctacccaggagactgaggcaggagaattgctgaaacccaagaggtggaggttgcagtgagccaagattgtgccagtgcactccagcctaggtgacagagcgagactccatctccaaaaaaaaaaaaaaagttaaataatgtatattgagtacttacgtatcaagtctatactaggtgctatgcctcatttaaacatcacaacaaaactatatgctaggtatcattaccctcattttatagatgaaagattcagataggtcaaatccctttatcaaagtcactttattggtacaagacagaaataaaactcaaattcaaaaggagataattacttgggaagctaaaatcgttccatcggctgtgtacagtgggtcacacctgtaatcctagcactttgggagtcaaggcaggaagatcgcttgagcccaggaatttgagagaagcctgggcaatatagtgagaccctttctttatttttttaaaattaaataattatctttaaaaatgaaaaataaaagaaagaaaaataactcattggcaattcagggacttcttacagtttatctgagatggaccatctatgttacctgttacttcttacctgtcagcttagtataggcttccatgtcgtcaattgctgtagaaatgcgatacttttttcctccagcacctgtaatctctatgtagtcatctgctttgaggaaagcatctgtaatcctaaaaatcattttgcaaaaatttatgtttatgagaaattttgaatatttgccttatgtcttacttaaggaaatctttctactttagggaaacaaaataatgaggcacagtgttctaaagacaactgcttctccaccgtactaaatttgtgcttggtaagctgtgagctgccatgcttactgtgttccaggcactgtcgcagggctttgcattcaccatcttatttattcctcccaacaataaggtaggtgtattcagccctcattttatagatgcagaaatgaagtaaattttgatttaaccaagttaggaagaaacagtgccaggctttgaaactagatatctctgaattacaaaacaacaacaataacaacaacaaaaactcttaccgaagaattaacatacaaataggagaaggtattccaagtaatctgctcatgacaaaggataggtaaaaaataggaatgaagatatacttcctcaacacaaatgtgaaaacgaacatgaaaagttaatcaatttaaggctattttagagacatggaagaagtaacttgactcacacccagtgtttgataactccttatggatctttgagtcacggagagacctggctgtacagttttctgctatggttctgactgggtcaggaagaggtaaaattcctgttggttttaccatttggtactaattttgataaatatttgaaaggatacaaatagacattaatcttaatccttaaagttaacttttgtcattaatctcagaatttaaatattcatgtcctacctcccattctcctgatgagaatggtgtgtaagtgactacctgtgccgaggtcctgagtgatctcagcactgccgcttcacgtctggcctaagccagctcttcttcccttcatctgcccctttatccacttccctccatctgcccctttatccacttccctccttttcctccaactaaattaactttatgctagattttttttctttaaggaaaccattttcaatttaatcacttaatattcacttgaactcatctagaaatgtctagttgagcctagtatgatactctagccaagtatcaaggaaaattttatagggaaatgacaatcaagtttcttacattgtatcaataatgttgccaactttgtgttgataagctctacggtgtaaagagttgcgagtgtggaacatgtcatacagatttccaacttcctgcaggaaaacatgaagtaaatattaataggatcagattatgttaacgttattagagacaagtatataggacaaggaaggaaaagggatagtggcagacaagagggctatgcaccggggcttcttcattaacacctttgaccccactaaaaaatgaggaggcagattagtaaagccatttattggcttgcaactttcattttttttttttttttttttttttttaaaagatgaggtcttgctatgttgctcaggctggtcttaagtgatcttcctacctcagccttgctgggataacatgcatcagccactgtacccagctaactttcattctttgttttttttttttttttttttttttttgagatggagtctcgatctgttgcccaggctggagtacaagtccttcattgcaagaactttcattctttttcttttctttcttcctttttttttttttttgagatggagtctcgctctgttgcccaggctggagtgcagtggcgccatctcggctcactgcaagctttgcctcctgggttcatgccattctcccgcctcagtctcccgagtggctgggactacaggcgcctgccaccaagcccggctaatttttttgtatttttagtagagatggagtttcactgtgttagccaggatggtctcaatctcctgacctcatgatctgcccgcctcggcctcccatagtgctgggattacaggcgtgagccactgtgcccggccaagaactttcattcttaataaactaggccaggtgcgatggctcatgcctgtaaccccagcactttgggaggccgaggtgggcagatcacctgaggtcaggagttcaagaccagcctggccaacatggtgaaaccctgtctctacaaaaatacaaaaattagccgggcatgatggcgggtgcctgtaatcccagctactagggaggctgaggtgggagaatcacttgaacccaggaggcggaggttgcagtgagcggagatcacgccattgcactccagtctgggtgacagagcaagactccaactcaaagaaaaaaaaaaaaaaccctaaaatctatcacatgctcaaactctgtgacagtttccgttttaggcatcttaaattaaatatatatatattttaatcctcccaataactctaggaaataggtattactattcttatgttcttcattcttgacttttttttttttttttagacagtctcgctctgtcacccaggttggaatgcagtggcacacaatcttggctcactgcaacctccacctcccaggttcaaccgattctcgtacctcatcctcctgagtagctgggattacaggtgtatgctaccacgcctggctaatttttgtattttcagtagagacagggtttcactatgttggccaggatggtctcaaactcggtagcccaagagatttgcccacctcagccttgcgaagtagtgggattacagatatgtaccaccacgcctagcccttcttgactttctatagtatagtactatactactttttgattacatgactgccatctaacagggacctagtgatttcagctgtttaactacagttgacctttaacaacacatgtttgaactgtgagagttcacttatacagatttccttgccccgctgccacccctgagacagtaagaccaatccctcctgttcctgagcctacttaatgtgaagacgatgaggatgaagacctttatgatgatctacttccacttaatgaatagtaaatatactttctctgccttatgaatttctttctttctttttttttttgaggtggagccttgctctgccgcccaggctggagtgcagtggcgcaatctcggcttaccacagcctccgcctcccgggttcaagttatttttctgcctcagcctcccaagtagctgggattacaggcactcgccactgcgcccagctaatttttgtattttgagtagagacggagtttcaccatgttgcccaggttggccaggctggtctcgaacttctaacctcaggtgatctgcccaccttggcctcccaaagtgctgggaatacaggtgtgagccaccacgcctggccttgccttatgattttcttaataacattttcttttctctagcttactttattgtaagaatacagtagatggggcgtggcggctcacacatgtaataccagcactttgggaggccaaggaggacaagttgcttgaggtcagaagttcgagaccagcctggggaacatagcgaaaccctgtctctacaaaaaaaaaaatagaaaaattagcccggtatagtggcatgcgcctgtggtcccagctattcgggaagctgaagtgggagatttgcttgagctgggaaggtggaggttgcagtgatctgagatcgcaccactacactccaatctgggtgacagagtaagatcctgtatccaaaaagaaaaaaaagaatatggtatatgatacacgtaacattcaaaataggctggatgcagtggctcacacctataatcatagcactttaggagactgaggtggatgggttgcttgagcccaggagtttgagaccagcctgggcaacacagtgaaactccacctctgtaaaataaatttcagaattagccaagcataggcctgtagtcccagctactcgggaggcagaggaggaaggatcagttgagcccaggaagtcaaggctacaatgcactatgatagtgccactgtactccagcctgagtaacacagcaagaccctgtctggaaagaaaacaaaaaacatacaaaatgtgtgtaactgaccattaaggttatcaataaggcttctggtcaacagaaggctatttagttaagtttttgggaagtcaaaagttatatgcaggccaggtacagtggcttacacctataatgccagcactttgggaggctgaagcgggtggatcacttgaggtgaggagttcgagaccagcctggccaacatggtgaaaccctgtttccactaaaaagacaaaaattagctgggcgtggtagcatgcatctgtaaacctagctagtcacaaggctgaggcagaaaaatcacttgaagccaggaggcagagcttgcagtgagccgagatcatgccactgtaccccagcctaggcaacagtgggagactccatctccaaaaaaaaaaaaaggtaaagaaaagttttatacagattttcaactaggagaggggacagcacccctaaacaccattttgttcaggtgtcaactgtataaaatttttcaacactaatacagtgattaaaaatgagactctgggccaggcaccttggctcatgcctgtaatcccagcactttgggaggccgaggcgggcagatcacgaggtcaagagattgagaccatcctggctaacacggtgaaaccctgtctctactaaaaatacaaaaaaaattagccgggcatagtggcgagtgcctgtagtcccagctactagggaggctgaggcaggagaatggcgtgaacccgggaggcggagcttgcagtgagccgagatcgtgccactgcactccagcctgggtgactgagcgagactccgtctcaaaaaaaaaaagagagagactctggaaccaaactttttgggttgaaattccaactctaccacttgttaattatatgccttctctgtgccttaatttgcttgcctgttgaatggaataatagtatctatctcacagggttatacggaatgagttgatccgtccaaagcacttaaaatgatgcctcatacaagccaggcatgatagtgtgcacctgtagtcccagctacttgggaggctgaggagggaggatcacttgagctcaggagttcaagactagcctgggcaacacagtgagatcctatttcaaaaaaaaaaaatgcaaccaaccaaacaaaaaaaccccaaaaccagtgtctaactcaaaacttaataaatgtccatgttaattttattattatttaataatgcagtagaagggaagagactaaagatatttacaaatcctaggaattaagtaaagagactgacgatttaccaattattccaaattgttaaatggttatttccaaatttcagaccaggaacaacattcttcttattgcctcctctggcacagcttaccttatctctagcacaaatacgcaactcattgtctacttcacagacacgggcaaacttaataaagcgcttgtaatcaaaattattttggattccaagatgatggcagtccctagaaggattccaaaacagagagatgaaatttttcaacaaggaagctgtaccttaaatagtaatactaaatttatataaatattttagccaacttttcagaagtgttcagtgcatacctggcaaaataatcccatttgtccacatcaatgccatttcttttattagatactatctcataaaggaagcttttgttttcaggacgccctttatatggccactggaaggcaagaaaacccactggaagttttaggataggcaccaaatctatttataaacaaagcaaagcaattttattaatctgtaaaatataaacagatacctgactgggaatatgagataaactagaaggttctattctttctttcttccacttcatttcaaaactagtagaaagggaaaagaaatgctaaggtatatgataccctattgttaccacattttcttgtgccactgaaaagatctgaactctattacatttcccaaaaccaacaacttttgtgttttcttggtttataagtttttgaaaaatataaaatctaggccaggcatggtggctcacgcctgtaatctcatcactttgggaggccgaggagggcggatcacgaggtctggagtttgaaaccagcttggccaagatggtgaaaccctgtctctactaaaaacacaaaattagttgggcatggtagcaagtgcctgtactcccagctactcaggaggctgaggcaggagaatcgcctgaactcaggaggcggaggttgcagtgacctgaggttgtgccactgccctctagcctgggcaacagagcaagacaccgtctcaaaaataaataaataaataatataaaatctaataataaactaacaatgcttgaattcatgcattaaaacagtactatctttcaaagtagctacatacctagtctaaataatatgcattgttgaatgtattctttgagctccacttttttggaaataggatatttgctacaaaactcatctgtttatcttatactgtaagtacacttgtatatatttgaggaaacagccctaaaaatctcagggggaaattatttcccaactttatttttaattaaaaaaatacaaaagatcaaaaaggaaacaaaacagattttccattgaactggttcaacttttttgtagatcttcctataaatatttcaaatatgatttttttttaaatttgtagacaggatctagctctgttgcccaggctggagtgcagttgcacaatcacagatcactgcagcctgcctcagcctcccaagcatctgagactacaggcatgagacagggtttcagtattacccaggctgatctcaaactcctgggctcaagtgatcctcccatcatggcctcccaaagtgctgggattacaggcatgagtcactgagcctggccaaatatgttcattttaatggttaaataaaacatacacatttacattccaaacaaagttactttaggcttctatataaaatactgcaggccaggtatggtggctcacgcctgcaatcccagtattttgggaggccaaagtgggagaatcacttgagcccaggagttcgaaaccagcttaggcaacatagtgagaccacatctccaaaaaaaaaaattttttttaatgaataaaatactgcatatatattcactaaaaaagaatttatggccgggcgcggtggcggctcacgcttgtaatcccaccactttgggaggctgaggcgggtggatcacctgaggtcaggagtttgagaccagcctgggcaacatggtgaaaccccgtctctactaaaaatacaaagatttgccgggcgtggtggcacacacctgtaatcccagctactcaggaggctgaagcagaagaattgcttgagcctgggagacagaggttgcactgcgctgagatcatgccactgtactccagcctggccaacacagtaagactctatctcaaaaaaaaaaaaaaaaaaaaaaagaaagaaagaaagaaaagaaaagaatttatgccaagcacagtggctcacacctgtaatcccagcactttcagaggcagagctgggcagatcacttgagctcaggatttcaagactaacctgggcaacgtgacaaaaccccatctctacaaaaaatacaaaaattagctgggcatggtagtgcacgtttgtggtcccagctactcaggaggctgaggtaggaggatcgcttgagcctgggaggtggaagttgcagtgagctgagattgtgccactgcactccagcctgtgtgacagagtaagaccctgtctctaaaaagaatttctgtatatatatttttgggaagtaacttctaactaattcagttgagaggtagaaaaaaatataagccttttattttttgcattaaacagtagaaacatagaactcatattttatcatttagcctctaaaatagccaaatgtataactcagaaggaatcatgaaaaggctagatgaaaagcaccagtcagttaaaattaagctgtacataaacttaccaatgaatcttcgacaggtgattcaagtggtcctacaatttgttcctttataaagcaaatatcttcttcagggatgagaccatattgttccatgacaggcttaattccattagaattaataaggtgctcaaacatcataactgagccttgttcatgctaggaaaagtaagcacaatatgatgtgttaaagattctagcccattgggagccctgactaacaaaattatcctcaattccaagtaattctgagataaaggtctattgcatattaattctctagtttctaaccacaatcttaggaacatttttaaaaacctgtcagatttttcattttactagtagtctacaaaccttttacaaaacttatttcataaacatatttaatgcatttaatgatataatcatttacagttcctaaatgaatattataagatcatgtagacagaattacattttaataaatatcatcataaaattgaattttattttttcatcagcctttgaacacgtgcagttataagctctgttaggcactaccatctagtggtgaaaaggggtaactgcaaacttgccagtaaaaacaaagatctcccttgaaatctccaattggcctgtttgctcatctctctctgctcactcattcacaatcaatgtaaaggatcaaatgaactcctgaagacatctgccctttcctagatcctaccaaaaactaactcaagatgaaaaacaaaacctgaattatcctataactatatttttttaaaaaaagagacagggaattgctctgttgccctggctagagtccagtgatgtgatcatggggtcactgtagtcttgaactcctgggctcaagtgatcctcccacttcagcctcccgagtagctgaaaccacaggtgcacaccaccctacccagctaatttttagatttttttgtagaggcagggtcttgatttgttgaccaggttggtcttgaactcctaggctcaaataatcctcctgtctcagcctcccaaagtggcaggattacaagcaacttgccctataactattctttccccgcccccgcagaaacaattcttgctccagaaactattcttaaaaacagaatcagggctgtcaggcctgggtgcggtggctcacacctgtaatcccagcgttttgggaggccgaggtgggcggatcacttgaggtcaacagtacaagtttggccaacatggcaaaacctcctgtctactaaaaaatacaaaaattagccaggcatggtagggtgcacctataatcccagctacttgggggactgaggcaggacaatcacttgaacccaggaggtggaggttgcagtgagccgagatcgccctgcactccagcctgggtgggcaacaaagtgacactctgtttcaaaagaaaaaaaaaaaaacccacaaaaacagaatcaggctgggtgcagtggctcacatttgtaatcctagcatttttttgagaggcaaaggtgggaggattgcttgagcccaggagttcgagagcagcctgggcaacaaagcaagaccctgtctctacaaaaagataaaaagattggctgggtatagtgacatgcgcctgtggtcccagctacttgggagaccaaggtgggaggattgcttgagcccaggtggttgaggctgcagttagctatgttcatgcctgtactccagcctgggcaacagagcaagaccttgtctccaaaaaacaacaacaacaacaaacaaattggccgggcacagtagctcacgcctgtaatcccagcactttaggaggcggaggcaggcagatcacgaggtcaggagatcaagatcatactggccaacatggtgacaccccatctctactaaaaatataaaaattagctgggtgtggtggcatgcacctgtagtcccagctactcaggaggctgaagcaggagaaacgcttgaactcgggaggcggaggttgcagtgagccgagatcacgccactgcactacaggctgggcgacacagcgagactctgtctcaaaaaaaaaaaaaaaaaaaacgaattgaatcaagatatacgtaattacaaagaggaaaaatagtaactttataatggagagatttgacagacaatgccttaatcaagtaagcagaattaatatcattggtattggctcaactaggatttatgtgcctcctgagatgatacactatgaaggatgcatcactgatttttttggagacagagtctagctctgtcacctcctgggctcccgggctcaagcaattctccttcctcagcctcccaagtaggcacgtgccaccacacccagctaattttttgtggttgttttttttttttttccctcttgttgcccaggctggagtgaaatggcgtgatcttggctcactgcaacctccgcctcccaggttcaggtgattctcctgcctcagcctcccgagtagctgggattacaggtgcccaccaccatgcccagataatttttatatttttagtagagacagggtttcgccatattggccaggctggtctccaacttctgacctcaggtaatccacccaccttggcctcccaaagtgctgggattacagatgtgagccactgcgtccgatctggacacatcacttttgtggcattctaccaaaaatgcatagcttgaatccatgaggaaacatcacactgaaactcaaattgaggaacattccacaaaatagctcagttgctctttaaaaaaatgacaaagtcactaacgataaagactgaagaattgctccagatcaaaagaaactagaaaaatggcaactaaatgcaatgtgtaattctggaccagggaaaaaaagtttttttcccctttttctatatggacaattggtaaaatttgaaagtctgaattagataagagtactgcatcaacattaatttactgattttgataattatactatggttatataagaaaatgttgtttttaggaaatacccactgaagtatttagaaataaagtatttcaacaatttacattctttgagagacagggctcttgctctatcacccaggctggagctcagtggcatattcatagctcagtgtatccctgaactcctggattcaagtaatcctcccgttctcagtagctaggaccacaggtgtgcaccacaatgaccagctgatgttttcataattttgtagagacagtttcactatgttgcccaggctggtgttgaactcctgggctcaaagctatcctcctgccttagcctcccaaactgttgggattacaggtgtaagccactgtgtccagtctaaaaactaactttctttttttgagacaagttctcactctgttacctacgttggagtgcagtagcacgatcacagctcattgcagcctcgacctcccaggctcaagcaatcctgccaccccaccatgcctggctaatttttaaatttttttgtagagacggggtttcaccatgttgtccaggctggtcttgaactcctgggctcaagcgatctgcccaccttggcctcccaaaatgttgatattacaaccatgagccactgtgcctggtcaaaacttactttctaatgattcagaaaaaaaatatctatatataaagagagagtattttatttattttttgacacagtgtctcactctgtcacccaggctggagtgcagtggcgtgatttcagctcactgcaagctccgcctcctgggttcacgccattctcctgcctcagcctcctgagtagctgggactacaggtgcctgccaccacacccagccaatttttttgtatttttagtagagacgggatttcaccgttagccaggatggtctcaatcttctgaccttgtgatccgcccaccttggcctcccaaagtgctcagattacaggcgcgagccaccacgcctggccaagagagagtattttaaaaaataaaaatgaggtggatcacttgaccctgggaggcagaggttgcagtgagcttagatgacatcactgagctcctgcccgggtgacagggcaagaccctctctcaaaaacaataaaataaaaataaataaataaataaataaagtaagggattttcaaaatagtagttttaaatatatcaatgccaactgtgaatatactagcaaacagaaaaaattaagtttcataaagctagcacagaccataataacaactaaaattataaggaacttaggagtaagtataacaaagatgtatgactttcatggcaagcctaggcaacatagtaagactccatctctacaaataaatacccaggtgtgacggtgcaggcctgtggccccagctacttgggaggctgagatggaaggatcgcttgagtctggaggtcaagaccagcctgggcaacatagtaagactctgttctccacagaaaggaaaaaataaaaacataaatcttattataaagtatgtcaacctaaaaggaaggagctgagaaatatttaatatagagagtttatttgggccaaggttgaggacacatttacaaattgccttggggaatgcttggggagaacaaaagaggctcaagtttttaaacaaaaaaggactggccaggtgtggtggcttaggcctgtaatctcagcactttaggaggccaagcggggcagatagcttgagctcgggagttgagaccagtctgggtaacaaagtgaggcccactccctctacaaaaaatataaaaaattagctgggcatggtagtgtgtgcctgtagtcccagctactctggaggatgaagtgggagaattgcttgagccttggaagtcgaggttgcagtaagccatgtttgcaccactgcactccaccctgggtgacaaagcaagatcctgttgaggggaggggaggggaaaggagggaagggggaaggggaaagaaaaggaagggaaagaagggaaggaagggaaagaaaggaaggaaaggaaggaaggaagggaaaaagagaaagaatgagaaagaaagaaagtgagaaagagaaaaagagagacagagacagaagggagagaaaagaaaaaaaaagaaaagagcataaatcaggaggaggaggtgatcacaaagaggaggtgataacaaaagttgttagtcaggaatgttcactggcttacagaaataacattagttagtgattggctacatattatgaagtacaggatatatggcattttatggttacctggcatcccacataacagctggcttcaagagataataattatttagctcaagggggcgtgacatgattgctgttctatttcaatgcctctctgggcctgataatgtaaaggggctcatatttctcagataaaaatttcttttcttctttttttttcttccccaagtaacaagtgtggaaacagaacagaatgcagaatgattcatcatatatgggaagttaataaatgttggggttggtattacagtcagtggggataggatgaactattaaaaaattagatttctcggccgggcacggtggctcacgtctgtaatcccagcgctttgggaggccgatgtgggtggatcatgagatcaggagttcgagaccagcctaaccaacatggtgaaagccatctctactaaaaatacaaaagtcagccaggtgtggtagcacatgcctgtaatcccagctattcaggaggctgaggcaggagactcgcttgaacccaggaggtggaggttgcagtgagccaagatcgcaccactgcactccagcctgggcaacagagtgagactccatctcaaaaaaaaaaaaaaagaaaaaaaaagatttctcccatatacttacacaaaaataaattgtacacgagctaaggatttaaatgtgaaaggcaaaatgcttaaaggaatagatttggtaatgattgagaagatcctattagatcaactgcagaagaaaacaactataagctctggacaactccctgaaggtcctggagagagaccaaaaccaagtggatgttagacctcaatacttagaagggagaggtgctgggtgacattccggttttatggttttttgcctaagggcaggccccaggacagaaaaactggtgagaaactacccattttactggcttgcagaaccagagtacttcatcaaaattgaaaacgtctgtttttcaaaaggcaccatgaaaaaatgaattggccaagccagacactggggaaaaatattcacaatacatatacctaaccatatatatacataaagaattcctacaactcagtaatcaaagagcaagcaatcaaactttttaaacgagtaaaatgttgagagttctttgcagaagaagatatatcaataacaaagtacaaagtacaggaaatagtattcaacatacattagaaaatcaaaccatgaaataccatttgacactcattagaagggctaatttgaaaggtcaaatgttgatgaggctgtaaaacaactggaactccagtatgttgctgatgggagtgtaaaatggtacaaccgcattggaaaactctggtagtttcttatagaattaaatacatatctaccatatgacccagcaattctagctcctcggtatttacctaagtgaaatgaaaatgtatttctttattttatctatttttatttttataaaataatgtatttctgctgaatgtatttcttgttttaaaaatgtaattaactttccacactacaacaacatagaaaatgtatttctaccaaaatcttgtacgataatatgcacgacaaccttatttataacaaccaaaacctgaaaacaatccaaattccaacaaaacaagaaagggtaaacaaattgtgacttatttgcataatgccacactacgtaggcgataaaaaaaaggatcaactactgaggcacataacatgaacaaatctcaaaaccattatgttgagtaaataaagcaaggcataaaataggacctcctatatgattctgcttaatcaagtctaagaacaacaaaattcatttatgtttgtaaaaatcagaaggtgatggtggggtgagggggagtgagaattgactaggaaaaagcacatgggaatttttcaggaagatgaaaatgttctatatcctgactgggtaatagtcatatggatgtatacgcctgtcaaaactcactgaacttaagatctggacaacttattgtatgtgaactatacctcaaaaaaagagagagagaaaaaaaaagtggttgacatgtaagaagttttcaatatatattaatatcctttttctattcccgttccagaaatacagtgtagtaaaaaccaacctaattttacttctcaaaaattgattccaaaatatgggacagccacctgcaaatgcctaattttaaaatgattcatttaatatatatgacttggctggtaagttagttcgtggtcataccaaatgtgtcaaaactggagttggccttttattatacagtagtacaatggagcagaaggagtattaaactggcaactggttttgtattgctgattccagtatttaacggctttgtgatttttgatgcatcaatacacatccaagagtttcaagttcctttatttgtaaaaagggagataacgataacttccttacagactactgtgagaaccaaacaaaagcatatatatatatatgtgaatgaaagcaccctggacactgtaatggggaagtattttataacacagtagtggaaccaaacagataaattaactaaataacctgcttaaatagtctttctttttattgactattgactgtatgaatacataccgtccatttcacctccgggcgagcaagtggaataaatcgtccatcaaacatgtgagaaaatggcccatgaccttaaaaacaaaagcagccttagaacaagaaaaacatctgtaaaccaacaaaaactttttccttttttttttttttttttttgagacggagtttcgctcttgttgcccaggctggagtgtagtggtacaatcttggctcaacacaatctccgccccctgggttcaagcgattctcctgcctcaggctaccgagtagctgggattacaggcgtgtgcaaccacatccagctaattttgtatttttagtagagatggagtttctctacgttggtcaggctggtctcgaactcccgacctcaggtgatccgcccgtctcagcctcccaaagtgctgggattacaggcgtgagccaccacactcagccaaactgaattctttaatctttttagtttaacttgaatagcaaaagaaattaataatctaaaaatacaatcacaaaaagggacaaaccctttcttcctatttctaaaacaggagaacaggaagcagaaacatggaaaagtaagctctccatcgagcagtctccagtcaccaggttttacataaatctgataaaagggcagtttttgttgttttttgaagagacagagtcttgctatgttgttcaggctggagtgcagtggctattcacaagcatgatcattatgcactgcagccttggactcctgacctcaagtcatcctcctgcctcagccacctgaatagctgggactacaagcatgcaccaccacacagggcttgataaatggacaattctgtgtaactaaaaagaatgttaatgccaaaaactttttgaaatcttcagattgaaaatatctggattaaaatagcagtttcaagaaaatccactagggccaggtgtggtggctcatgcctgtaatcccagcactttgggaggctgaggtgggtggatcactttgagtcaggagttcgagaccagcccggccaacatggtaaaaaccctgtctctactaaaaatacaaaaaattagccgggcttggtggcgggcacctgtagtcccagctactcgggaggctgagacaggagaatggcgtgaacctgggaagcggagcttgcagtgagccaagatcacaccactacaccccagcctgggtgacagagcaagactccatctcaaaagaaaaaaaaaggggctgggcgcggtggctcatgcctgtaatcccagcactttgggaggccgaggcgggtagatcacgaggtcaggagttcaagacaagcctggctaagatggtgaaaccctgtttctactaaaaatacaaaaattaggcgggtgtggtggcaggcgcctgtaatactacctactcaggaggctgaggcaggagaatcgcttgaacccgggaggcggaggttgcagtgagccgagattgcgccactgcactccagcctgggcaacagagcgagattctgtctcgggaaaaaaaaaaaagaaaatccactggggtgcaggaagaaaaaattagaatttctcttataactctcaagcttaaaaaaatctatctttggccgggtgtggtggctcatgcctgtaatctcagcactttgggaggctgaggcgggtggatcacctgaggtcaggagtttgagaccagcctgaccaatatggtgaaacctcatctctactaaaactataataattagctgggcatggtggcatgtgcctgtagtcccagctacttgggaggctgaggcaggagaatggcttgaacctgggaggtggaggttgtggtgagccaagatcgtaccattgcactccagcctgggcaacagagcgagactccatctgaaaaaaaaaaaaaaagaagtgagccacttaactggagagggaagtctacctagactagccttggccctgctttgcaagtcacaggctacacataaaggctcgctaatgcagtgctcaggctcctggggactggcaaaggtttcccaatgattctccctcaaaataccaagaatccatcaaatttatcatctaggggctggtattggttctttgtaagtctccgggggacataaaaagagtgcctacttgctttaagtatctggctatccaaacagtggcatgcacctcccttcccctgccctgagggtacacacaaactctcagagtccctgaataagtaggaataaactataaggatagaggtaaaaacccccatgatttaaaaggaacagtcccggcccaacgtggtgacttatgcctgtattcccaacactttgggaggccaagggaggtgaatcacttgaggtcaggagttcgagaccagtttcaacaacatgatgaaactgcatctctactaaaaatagaaaaaaattagccaggcgctactcgggaggctgaggcagaagaatcacttgaacccaggaggcggaggttgcagtgagccaagatagtgccaactgcactccaatctgtgtgacagagcaagactccatctcaaaaataaaaaaataaatgggacagtcccctttctctttgtcacaggaaaaggattatattcttttgcttggattaaagtggcctaagacctcacatggatcagaaaagacaaggagttctctaaatgtgttaatccacttgggcagattagagattataaatatgaaaaaaaatggatttcaccaaataaccgaaggaaaaatggtgattttatttgataagaaggacaaggccaggcgcggtggcttacacctgtaatcccagctctcagggaggagaggcgggaggatagcttgagcctaggagttcgagacctgcctgggcaatatagcgagatcctgttctccacaaaaaggaagaaaaaaaaagaccaaaaaaaaaaaaaaaaataagcataagaaggataaaagaaaaataaaattcacatatcatcctaaaagcagtagtaagaaaaactcactagcaaaaagccctttcatataacctgtagtaaacatgatggccgggcacggtggctcatgcctgtaatcccagcactttgggaggctgaggctggtggatcacctgaggtcaggagttcgagaccagcctggccaacatggtgaaaccccgtctctgctaaaaatacaaaaattagctggatatggtggtgcatgcctgtaatcccagctactcgggaggctgaggcacgagaattgcttgaaaccaggaagcggaggttgcagtgaaccgataatgagccactcactccagcgtgggcaacagagcaaaactctgtctcaaaaaaaaaacaacaacaaaaaaaccactttagcaaagatgtttaacatgagaaattcactgaaagttgccaagaaaataaaatagcaatgttttctacttatgaatcattctaggaagaagcaacagtacatttatactaacatcaactgaagaattaaaatacaatttccatattctcttggttgatctgattttttaacgtcaaagagaggtaacatatgttatgattttacataacaactttgtctctttgtacagcttaccgagatcatgacaaagtccagcaatctgaacacagagaacatctcgttcacttatctgcagctctggttgtttttcacccagtgcgtgaactagacatcctgctagataccccaccctgcagagcaaaaacacaaaaagtcacttttctgtttgcaagaggagtgatagttctggtcctcaagaacttcagtatgtttccttaaacattctaacatacctttagggcaactttactgaacagtatatttcagaactaggcaggaacacacacaaacggaatcccaaaagcaggacctctggctcaatatcaccaatcattagaggaatgcacatcaaaaccacagtgagataccacttcacaccccttaggatagctactattaaaaaaagaaaaccagaaaataacaagtgttggacatgatgtgaagaagttggaagcctgtgcactgttagtggggatgtattatggtgtagctgccatggaaaacagtatgggtgctccacaaaaattaaaaacggaattaccacagtgatttagcaatttcacttctgggtatacacccacaataacgaaagtaggtcttgaaaagattggctgggctcaggggctcacgcctgtaatcccagcactttgggaggctgaggcgggcagatcacttgaggtcaggggttcgagaccagcctggccaacatgttgaagccccatctctactaaaaaatacaaaaattagctcagcatggtggcaggtacctgtaatcccagctatttgggaggctgaggcaggagaattgcttgaacccaagaggtacaggttgcagtgagccgagatcttgccattgcactccagcctgggcaacagagcaagattccgtccccaccaccctccccccaaaaaaagaaagagaatatatttgtacagacatgttcatagcagcactactcaaaatagccaagaggtaaaagcaacaggtatccatcaacaaatgaatgtataaacaaaatgtggtagatacatatgataaaatattattcaaccttaaaaaggaaataaaaaataatttaaaaataaaaaataaaaaataaaaaaggaaagaaatactgacacatgctacaacatagatgaactttgaggaaattatgctaagtgaaataagccagtgacaaaaagacaaatattatatgatttcactaagatgaggtacctagagtagccaaattcataaacaaaaaaaagagggccgggtgcggtggcttatgcctgtaatcccagcactttgggaggctgaggtgggcagatcacctgaggtcgggagttcaagaacagcctggccaatgtggtgaaactccatctctactaaaaatacaaaattagctgggcgtggtggcaggtgccagctacttggaaggctgtaatcccagctacttggaaggctgaggcagctacttggaaggctgcttggaaggctgtaatcccagctacttggaaggctgaggcaggagaatcacttgaaccgaggaggcggaggttgtggtgagccgagattgcgccattgcactccagcctgggcaacaagagcgaaactccgtctccaaaaaaaaaaaaaaaaaaaaagtagaatggtagttactagggggttgcggggggttgcggggggagacatgaagagttgtttaatacgtatacagtttcgtgtttttttttttttttttttgagatggagtctcgctgtgttgcccaggctggagtgcactggcctgatctcagctcactgcaacctcaggagtagctgggattacaggtacactccaccatgcccggctggttttgtatttttagtagagacggggtttcgccatgttgcccaggctgatcttgaactcctgacctcaggtgatccactggcctcagcctcccaaagtgctgggattccaggtgtgagccactgcacccggcaagtttggttttgtaagatgataagagttttggcaagtttggttttgtaagatgataagagttttggcaagtttggttttgtaagatgataagagttttggcaatcgattggttgcacaatgtgaatgcatttaaccctactaaactgtacacttaaaaaacacttaagactatgtattttctattctgtgtattttaccacagtttttttttaaagtaggaatatctggctttgtaatgtttacaacataattggagatgaagtacttaaatgcacttccagcacttccatctgagccattcctaaattcttttcccctgaactctgagctacatgaggacagaggcgattgttatctttttgtggtttggtagggcttagtaaggttcgataaatatttgttgatgaatgaacatttgagtatagacacatgttgtgcctaactaaaaatgcttctacacaaacagaaaaccaaagtaatatactgtgagtacttcatgaaaatctcaaagactgtctattcttccctgtccacttcctcctggctctacactgcataatggaaatgcagaccaacgtctcagcttagttgtatgtaacagaggcatcgccttctctaagattatgaatgcttttttaacttacgcatttcctgacaggtaagaaaatgatctggtttgaaagagcaactctgtaccagagtaaatagagaatacagaaaaattaaataatcaaatatacataattagttgtatcagcaaccgacccattagcttttatttatttatttatttattttgagactgattctcactctgtcacccaggctggagtgcaatggtgctatctcagttcactgcaaccttggcctcccgggttcaagctattctcctgcctcagcctcccaagtagctgcagcgtgcgccaccacgccttgctaatttttgtatttttactagagacggggtttcaccatgttgctcaggctggtctcgaactcatgatctcaagtgatccgcctgccccggcctcccaaagtgctgagattggccgggcacggtggctcatgcctgtaatctcagcattttgagaggccgaggcgggcggatcacgaggtcaagaaatcaagaccaccctggccaacgtggtgaaaccctgtctctactaaaaaatacaaaaattagccaggcgtggtggtgggcacctgtaatcccagctacttgggagactgaggcaggagaatcacttgaaccctggaggcagaggttgcagtgagctgagatcgtgccattgcactccagcctgggcgacggagtgagactccatctcaaaaaaaaaaaaagtgctgggattacaggtgtgagccaccacacccagcccctgttagcttttaattaatatttaaaaacaaatccaactgacctgtctatagatactttcattatttttccaggaaagatctgaggtggttaagaatacataaaataaataaattgcaacaaggtaaataaaaagcctcaattttggggctgggcacagtggctcatacctgtaatcccagtactttgggaggccgaggcaggtggctcacaaggtcaggagatcaagaccagcctggccaagatggtgaaaccccgtctctactaaaattactaaaattagccgggtgtggtggtgggcgcctgtaatcccagctgctcaggaggctgaggtacagaactgcttgaacctgggaggtcgaagttgcagtgagccaagattacgccactgcactccagcctagtgaaagagactctgtctcaaaaaaaaaaaaaaaaaaaaaaaaaaagcctcaattttctcatcaataaaataaggacattatcatcattttgtaaaactatttattctctaaaagattaagacaactatttcttttttttcctgttttctttttctttctttttttttttttttttgagatggggttttgctcttgttgcctaggctggagtgcgatggtgcaatctcagctcactgcaaccaccaacctcctgggttcaagtgatcctcctgcctcagcctcctgagtagctaggattacaggtgcgcacaatcatgtctggctaattttgtatttgtagtaaagatggggtttcacaatgttggccaggctggtcttgaactcctgacctcatgtgatccacccacctctgcctcccaaagtgctgggattataggtgtgagccaccatgcctggcctaagataactatttcatgagacagagaaaatacttaaaaactgcaagttccccaccccattcccttcttaccctagactatgctcaaatcgattgtgtgaagctcctggaaaaacatagtaaccacctcccagctgtttgatgtatcgaagacgttgaaattgaggtgtatcaatgattcggacgaggagagggtggagctcaatgtggccatggataggatcattaattacctagaaaattatgtttaattaatacaaataacgacatgtaagtccaactgaaatttgtgtgcagccattcctaattatagtgcaaagtcaaagctatttgatttttcaagtaaaaatactaacggaaatgacaagatgttaacatcattaccttatttaggtatcactaccagacagatcaagtatattggatttgagtatattttacttcttcctaatggatgtgaataacagaaaaataaggattttgattttttattatgtatatgacttagtctttaataagtttgtcttgtattcaagttaaacatgcatattcatttcgatttaaacacattcatccacatcatgtaacccatatcactataggtattatgtctaatttttttttttttttttgagacagagtctcactgtgttacccaggctggagtgcagtggcacgatctcagctcactgcaacctctgcctcccaagttcaagctattctcctgcctcagcctcctgagtagctgggactacaggggtgtgccactatgcccagctaatttttgtattttgagtagagatggggtttcactatgttggccaggctggccgcgaactcctgacctcaagtgatccgcccacctcggcctcccaaagtgttgggattacaggcgtgagccaccgtgcccggcctaaatttttttttttctaaatgtatctatacagcactcatcattaaaacagaaaagaaagaagggaggcagggaaagaaagaaagatggaaattcctctaccatatagataagaaatcatgcaggtccgagtgcaggtgctcacatctgtaatcccagcactttgggaggccaagagtttgagactagtctaggcaacatagtgagaccccatctttaaaaacaaaaatgcagtggcgcacatctgtagtcccgggtactctagaggctgaggtaggaagatcccttgagccccaggggatcaaggctgcagtaacctactattgtgccacaacacttcagcctgggcgacagagagaaactctgtctcaaaaaaagaagaaaaaaagcaagaaaataattttgtacagctgaacaatgtgtttatgtgtgtgtgttctttttgttttgtttttcttagagatagggtctcgctttctcaccaggctgcagtgcgttggctattcacaggcacaatcatagcttactgtagcctcaaactcctaggctccagggatcctcctgcctcagcctcccaaatagctgggactacaggcatgtaccaccattcctagctaatttatttttattctttgtggagacaaagtcttgctatattgcccaggctgacctcgtgtccgcccgcctcagcctcccgaagtgctggaattacaggcatgagccaccgcgcctggctaaaatctacttttaaaccatttaaggacctaaaagccttcactgtaaatttttcaggttgtaataactgtcttttttgtttgtttgttttttgagacagagtctagctctatcacataagctggagtacaatcagggctcattgtaacctctgcctcccaagttcaagcgatcctcccacctcagcctcccaagtagctggaactataccacgcctggctaatttttctttttttggtagagatggggtttctggcagggcatggtggctcatgcttgtaatgccagcactttgggaggccaaggcgggtggatcacctgagatcaggagttcacgaccagcctgaccaacatgatgaaatcccgtctctactaaaaatacaaaaattagctgggcgtggtggtgggcgtctgttatcccagctactcaggaggctgaggcaggagaatcgcttgaacccaggaggcaaaggttgcagtgagctgagattgtgccactgcactccagcttgggcaacagagtgagactctatctcaaaaaaaaaaaaaaaaaagattcattgatacatttgaaaaattagtcctcattatgtcaaacactgcactccctcttcaccattacacaatctcagcttcagaggccaactgaactaaatttagcataaagaacactgtgtcaagaacaaaccatggtgaccttgggttcggcaatggtttcttaaatatgacactaaaagtacaagacacaaatgaacaaaaaaaatataaattggattacataaaaacttaaaacttttgtgatccaaagaacaccatcaaaaaagtaaaaagacaacccacagactgggaaaaaatatttgtgtatcatatctcccataaggatttacatccagaacatataaagagctcttacaactcaaatcaaattgtgtgtgattgaacaacactgtgaactttctaaaaagcactgtcttgcatactaaaaatgagtgaatcatacaacttgtgaattatatctcaataaagcatttatgttttaagtatcaagttaggtaggtatgaaattagggtagaaatccttgaggtctgcaactgagtagcaaactaggtcaattcttgttgaactgcattgctgatgaagttaaattcatttaaggtattgatttcattactaagccgtgattcagtagtttgaaaatctatttccaacaactgtcatttataatttataaatgaggttaaacaatgttggtttgtttttttttttttttgagacagggtctcactctgttgcccaggctggagtgcagcggcgtgatcatggctcactgaagcctccacctccccaggttcaggtgattttcctatatcagcttcccaagtagctgggactacaggtgtgcactaccacacccagctaatttttctattgttttctattgtttgtagatggagtttcaccatgttgcccaggctggtctttgaacttaagggctcaagtgatccacctacctcagtctcccaaagtgctgggattacgggtgtgagccaccatacccagccaacaatgttctttttacagaaaaatagaaagaataaaagtgggcaattgaaaccactgactgccttaaatattacctcaaaaatatattattggctgggcacggtggctcatgcctgtaatcccaaaactttggaaggccgaggcaggcagatcacgaggtcaggagttcgaggccagcctggccaacatggtgaaaccccgtctctactaaaaatacaaaaattagccgggtgtggtggcatgcactggtaatcccagctactcaggaggctgaggcaggagaattgcttgaacccgggaggcggaggttgcagtgagctgagatcacgccactgcactccagcctgggcaaccgagtgaaactccctctcaaaacaacaaaacagggacaggcacggtggcacgtgcctgtaatcccagcactttgagaggctgaggcgggtggattatgaggtcaggagatcgagaccatcctagctaacgcggtgaaaccccatctctactaaaaatacaaaaaattagctgggcatggtggcatgcgcctgtagtcccagctactcaggaagctgatttaggctgaggcaggagaatcacttgaacctgggatttggaagttgcagtgagccgagattgcaccactgcactccagcctgggagacagagcaagactccatctcaaaaacaaaacaaaacaaaacaacaacaaaacattattatatagttgaaccaaaaatgttcattaaattttttcagatgtgattttcaatagaaaataagcctagaacgggctggtggctcacgcctgtaatcccagcactttgggaggccaaggtgggcagatcatgaggtcaggagttcaagaccagcctggccaacctggtgaaaccttgcctctactaaaaataccaaaaaaaaaaaaaaaaaaaaaaaaaaaaattaactgggcgtggtggcaggtgcctgtaatcccagctactcaggaggctgaggcaggagaactgcttgaatctgggaggcagaggttgcagtgagctgataccatgccactgcactccagcctgggcaacagagcgagactccctctcaaaaaaaaaaaaaaaaaaaaaaaaaagaaaagaaaagaaaaagaaaataaccgggtaggccagacgtgttggctcatgcctgtaatcccaacactttgggaggccaaggcagacggatcacatgaggtcaggagttcgagaccagcctgaccaatatggcggaaccctgtctttactaaaaaaaatacaaaaactagctgggcatggtggtgtgcacctgtagtcccagctacctgggaggctgagacaaaagaatcacttgaaactgggaggcagaggttgcagtaagccagattgtgccactgcactccagcctagacaacagagcaagactccatctcaaaaaaagaaagaaagaaaagaagtctataacttgcaaaagcaaaattaaaatatgtattcttatagagagggatctgaaataactcaaatactatacattacatctattttttaaaaaaagtgaaaaatgcaaatgatgatcgggcaaaaaagtacaaaaaaagaagatatcctacatcttctcccaggtctgaaactaagttttcttaacctaggaatgtcaaaagagtaaataaggtctatttcctgtcactaacaaaacaagaaacatttcatcaagtatggttttagaatcactctgaagagcttgtgaaaaatgcacattctggctgggcgcagtggctcatgcctgtagtcccagcactttggcaggacgaggtgggtggatcacttgaggtcaggagtttgacaccagcctggccaacatgatgaaaccccaactctactaaaaatgcaaaaacattagccgggtgtggtggtgtatgcctgtaatcccagctacttgggaggctgaggcaggagaatcacttgatcctgagaggcagaggttgcagtgagacaagatagtgccactgagccccaacctgggtgacagagagagattacatctcaaaaagaggaaaaaaaaaaaaaaaaggccaggctctgtctcaaaaaaataaagtttaaaaatatgtaaaacaatactatacattgtttatggatatacataaatatgcaataagagtaaaaaccattcatgacaatgataaacatcaaattcaggaagatgcttattacttctagggagaaaaggatagaaacataataaatagaaacagggccaggcgtgggggctcacatctgtaatcttagcactttgggaggccaaggcaggtcaatctcttgagcccaggagtttgagaccagcctgagcaacacaggaagaccccgtctttataaaaaatacaaaaattagccaggtgtggtggcatgcacccatagtccaagctactggggtggctgagatggaaggatcacttgagccagggagacggaggttggagtgagctgagattgcaccactgtactccagcctagatgacagagcaagaccacatttcattaaaaaaaaaagaatgtacaaaggaggtcttcaatagtttctaatattttgctctaaaaataacagacttgaagcaaattaggcaaaatattaatatttgacaagttgggtagtggtctacttatgcttttctgtatgcttaaacatattttagttcttcttctgatttaaatactctgtgctcattttagaaagtgcagaaagtttagaaaagatccactactcacaattctatcactgagaagcagatttcctcctattctcttcaaaatgaattttacataattgagttatatcactttatattcaaaaaacataacaaactcagatcctcttaccttcattgtatcaacgtggatttgaaccaatcgctggatataactaagcagcttcttcctctcccccaaggaactaaaattacaataggataagcaagtctatcattatttgcttaataataatccctgcagtatatagtagacataataaactttatattatctacactaacagaagttagattggaaggaacaatcaataattcaaacatacccctcctagaaactctctccttcctttgctgttaagatagggaactctcctgctgaatcaatataggcctcccacagccttctgtccttgaccctcctctctcttggtaaatttaagacttgaaaaactccacatctccatgtctactcaatgctcaaactgtacttccttttaaccaaactgaagtcaacatctaccctcataatcctggattgatttatgagcaccaggtatgactcaagcatgaatgaaatacatatgaaggctttaactttatttatattcattttccattgtcagtactccctcacaatgctccagtttcaagaaaatacataatgggaattaaatttgagcagctcgaagtcctgtgattcattatcctgcttcatttacaattactagttgggcccagcatatcatcctccctcctggctgggtgtcaacagagagtgcaggcaaagggttttactgatctactagataaccagattgaaaaaaaagtatctttctacaagtcatacatagactgggagtcagaggcactacattggcctctatggtacacactgaacccatggtaataagaacacttaagaataatatcttgggatacacagaagcattattacagctgataaattaaagcagcaaatttcgtgttttcctattcccctatcctcctcatcagtttgacataacaagcacagtgtaaagccaggctttcagaagtacttataggtggacttagtttaaggggagtcacatagttgagcaaaaccggagtcatagcataaaatatcaaacctaaactaaccccgtgaccacttaatattttcctaaactgacatttggtattcatcgcttaaaaccccaaaatcggccgggcgcagtggctcacacctgtaatcccagcactttgggaggccgaggtgggtggatcacctgaggttgggagctcgagacaagcctgactaacatggagaaaccccgtctcttctaaaaatacaaaattagccaggcgtggtggtggcgcatgcctgtaatcccagctactcgggaggctgaggcaggagaattgcttgaacccgggaggcggagattgcggtgagccgagatggcgccattgcactccagcctgggcaacaagagcaaaactccaactcaaaaacaaaacaaaacaaaaccaaaatcactgattagagtatataaaaccacccaaaaccagggggttgttttgtttagcaaaggacatggcattaaataaagatttaaagaagtcatgggccaggatatctagattatgaaagaattttattcctgtgttccaacatttctgaaatttaatgcttcttacaattgacatgtatatttaacgtgacaatgtttctatctaacttctttttttttttgaaatggagtcttactctgttgcccaggctggagtgcagtgacgtgatctcggctcactgcaagctccacctcccgggttcacgccattctcccgcctcagcctcccgagtagctgggactacagccgcccgccaccatgcccagctaatttcttttttgtttttgtatttttagtagagacagggtttcaccatgttagccaggatggtctcgatctcctgacctcgtgatccgcccgcctcggcctcccaaagtgctgggattaaaggcctgagccaccacgcctggcctgtttcttacttgttaaaaaaacctttataaatcaatggttgttcataaaattgagggcctactaggagtgcttgtctaagctggattctccctagaaagcagggtccaggataagagcttgcaagtaattaatcttggggtgaactctgggcacagggattggggggtctagggagggtaaaataggaaattaggtaaaaacagtacaaaggtccattaacaagttgattgcattggtactactgtgagcaactggatggagtggtgggtagggctaatcccactggcaacctgtaaggcagcactgtctagtagaactttctgcgatgatggaaatgttctatatctgctctgtccaacacagtagccgttagccatagtgactactaagtacttgaaatatggctagtgtaactgaggaattttttacttaatttacttctaattaatttaaacgtgaagctagttgttattatacagaacaatacagctctaaggagtcctacagaatttgagttatgaggtggggcacagagacgtgcaatatagtgttccttctggaacactgcaatatagtgttcctttgtctgttttgttcactcatgtgccccaaattcatggaagaattcctagtacatagtgagctttccaaaaatattcactgaatgaatcaatagcacttgggtccacaaacatgcacatggctcccttgaaaagaaagactgtattagaacaaattccattcaggtcaaatagtaagcaactattatgtacaagaaacaagtagtaaaggggactttgagaggactgagagggctgaaatgtggttatgaaagagtcatgccggggacagtggctcacgcctgtaatcccagcactttgggaggctgaggcaggcagatcatgaggtcgggagttcaagaccaccctggccaacatagtgaaaccctgtctctactaaaaatacaaaaattagccgggcatggtggcacacacctgtagtcccagctactcaggaggctgaggtggtagaatcacttgaatctgggaggtggaggttgcagtgagccgagatcacgccactgccctccagcctgagtgacagagcaagactccatctcaaaaaaaaaaaaaaaaaaaagaactttgggaggcctgaggcgggcagatcacaaggtcaggagattgagaccatcctggctaacacgatgaaaccccgtctctactaaaaatacaaaaaattaaccgggcatggtggcacatgccagtagtcccagctacttaggaggctgaggcaggagaatcacttgaacaccactgaacttgaactccagcctgggcaacagagtgagacttcgtctcaaaaaaaaaaaaaaaaagaaagggctaagatgaggtccctggagattctgatccaaaggatatttactggaagtcagttaaatgttctacagtgatcttgtttcacaatgtacttctgttatcaattactaagcaacagcacaggaagtaattcagtataatcctttgttttgattctttggttactgttaccacaaacaacatgtaactaaaatttcagaagagaaggccatatttccccactgttgccaattttctaacagaaacaaaatcttcattttaagaagtatttaaggccggtcgcagtggctcgcgcctataatcccagcactttgggaggacgaggtgggtggatcacctgaggtcgggagttcgagaccagcctgactaacatggagaaaccccgtctctactaaaaatacaaaattagctgggcatggtggcgcatgcctgtaatcccagctactcgggaggctgaggcaggagaatcacttgaacctgggaggtgaaggttgaggtaagacgagatcgtgccattgcactccagcctgggcaacaaaagcaaaactccgcttcaaaaaaaagaagtatttaagcaccagatcctctactgagatcattaaaggagccccactctaatctagaccctagaacctacagccatacacagagatggatctatgtaactatgtatgtatgtatgtatatatgtatctatctacctacctacctatctgagacagggtcttattctgctgcccaagctggagtgcaggagcttatcatagatcactgcaaccttgaactcctgggctcaagggatcttcctgcttcagcctcctgagtgtaggtgggactacaggtgcatgcacagtacccggctaattttttaattttctgtatcactatctataaaatttactaagcgttaatcatatgcttcaacactttatgtacatcatctcattattgttatccattttacaggtacagaaactgaagggttaaatgacttctcccaaattatacaactaaaaagtgcctgttttgcatagtgtctttaaatctaataccagggcatattccaatctttaggaaaacctagaaatatgctcaagataggggtgtagccttgattttcttactaacatttttttccctattggttcttatgtatttcccagtgtgtataattcaattattctgaacttgagagtaaaaagttggtcactacaaacttgatgaagatttgtctgcaacattatttaaaataggaataaggccacacacggtggcttatgcctgtaatctcagcactttgggaggccaaggtgggcagaccttggcccaccttaggtcagaactccagaccaccttaggtcaggagttcgagaccagcctggccaacatggtgaaaccctgtctctactaaaaatacaaaacttagctgggcatggtggtgcatgcctgtaatcccagctactcaggaagctgaggcaggagaatggcttgaacccagggggttcagtgagccgggatcgcaccattgcactccagtctgggtgacagagtgagactctgtctcaataaataaataaataaataaaattaaaaataaactaaaataggaataaacagtaatagcaaacataggatttgtacagcgaaaacaaacagcaggtggccagtcgcggtggctcacacctgtaatctcagcactttgggaggccgaggcaagcggatcacttgaggccaagagttcaagaccagtctggccaacatggtgaaaccccatctctactaaaagtacaaaaatcagtggggcagccgggcgcggtaattccagcactctgggaggctgaggcgggcagatcacgaggtcaggagattgacaccatcctggctaacatggtgaaaccctgtgtctaccaaaaaatacaaaaaagtagccaggcgtggtggcaggcgcctgtagtcccagctactcgggaggctgaggcaggagaatggcatgaacccgggaggcggagcttgcagtgagccaagatcacgccactgcactccagcctgggagacagagcgagactctgtctcaaaaaaaaaaaaaaccgaaaaaaaattagtggggcatggtggtgggcacctgtaatcctagctactcaggaggctgaggcaggagaataacttgaagccgggaggcagaggttgcagtgagccgagatactccagcctgggtgaacaagagactatctcaaaaaacaaatgaacaaacaaaaccagcaggcaagggattctgctgttttaaagcacttcatagatttaaaatgaggacagtttatatcagagattttgggctttgtccctgaaagatggataaagtgtgtttggttataacgtgaatttatttcttcattcttaccttactccaagattttcaaaacgagactcatcaagacaaggcagtaatgcgcctgtgatttcattttctatggaagaaaaaagacaaattcaatgtatacaacatatgcttttcattttctttcaatttggatacaccaacatttacccagatccacataagtgagtacccactgcaggcaatggattgtgccaagtaccacttttttgatctgctacttgtaaagacttaattttaattaaataactaaaccaagaagcattttttgataaatcacgtgaaaatttcaaaattatttgtgtaaattagttccaagaaaaaccagttgcaaaaaggaaagtgaaacccgactacctgttggggttttgccaggtcagcagctttgagttggggagggaaggaaacctaagtctattgttcttagaattaacaaggtttgagttggggagggaaggaaacctaagtctattgttcttagaattaacaagttaaaaccgtgaattcaagagtgcttaaagtgttgatttttctcaaacctcctgggaaagcactcaatactctgatttggaagaggtgtgtgtgtgtgtgtgtgtgtgtgtgtgtgtgtgtgtgtcctgggaaagcactcaatactctgatttggaagaggtgtgtgtgatttggaagaggtgtgtgtgtgtgtgtgtgtgtgtgtgtgtgtgtgtcctgggaaagcactcaatactctgatttggaagaggtgtgtgtgtgtgtgagtgtgtgtgtgtgtgtgtgtgtcctgggaaagcactcaatactctgatttggaagaggggtgtgtgtgtgtgtgtgtgtgtgtgtgtgtgtgtgtgtgttgttgggttttttcctttctctttctatacaattaattctaatctttcctgacctcaaattccagaactctggactattttcttttattttctttgagacagggttttgcttgttgcccaggttggagtgcagtggtgcgatcacatctcactgcagccttgacctcctgggctcaagcgatcctcctgcctcagcctcctgagtagctgggaccacaggcatgtgccactgcacctagctaatttttatttttattttttgtaaagttgaggtctcctgatgttgcccaggctggtcttgaattcttgggctcaagtgatcttcccacactggcctcccaaagtgctgggattataggtatgagccactgggccaggcctccagtggtttttgatgagaatacttgttaaggtatagatcacatgagttctagagtccaaagacctaaccttaaaaaatctagctcttttttgtagtggtgtgatctctgaaaagttactttacatctttggacctcgcatacatcatcggtaaaatgtgttgagtgtagtaacttatttcagacttcttgtgaggctgtattccataatgagaaaagggacactgtaccttgtgcttggcttatcaaattaaaaaaaaaatggacttagataaagagagactttttttttcttttccgagatggagtctcactcggtcgcccaggctggagtgcagtggcgggatcttggctcactgcaacctccgcctcccaggttcaagtgattctcctgcctcagcttcccaagtagctgggactacaggcacataccaccatgcccggctaatttttgtatttttagtagagacggtgtttcaccatgttggccaggctgggcttgaattcctgacctcaggtgatctacctgcttcggccttccaaagtgctgggattacaggcgtgagccaccgtgcccggccaagagaaactttattagaaagaaagactattgctggtcgggcgtggtggctcacacctgtaatcccagcactttgggaggccaaggcgtgtgaatcatcaggtcaagagattaagaccatcctggccaacatggtgaaaccccatctctactaaaaatacaaaaattagccaggtgtggtggtgggcacctgtagtcacagctactcaggaggctgaggcaggagaattgcttgaacccgggaggcagaggttacagtgagccgagatcacaccactgcatttcagcctggcgacagagcgagactctgtctcaaaaaaaaaaaaaaaagaaaagaaaaaaagaaaagaaaagaagaaagactatttctacagggagaaagctccaatatcagatatctgcaagaggctcaggaatcaaacacataggccggccgggcgcggtggctcacgcctgtaatcccagcactttgggaggcagaggcggatgcatcacctgaggacaggagttggagaccagcctggccaacatggtgaaaccctgtctttactaaaaacacaaaattagccaggcgtggtggcgtgcacctgtaatcccagcaactagggaggctgaggcaggagaaccacttgaacccgagaggcagaggttgcagtgagctgagattgtgccggtgcacttcagcctgcgtgacagagcgagactccatctcagaaaaaaaataaaataataaaataaattttaaaaaataatcaaacagaggcccaagaaccaaacagaggttgggcatggtggctcacacttgtaatcccagcactttaggaggccgaggtgggtggatggtcactcgaagccaagagtttgagaccagcctggccaacatggcaaaaccctgtctctaattaaaaaaaaaaaaaaaatgaggccgggcgcggtggctcacgcctgtaatcccagcactttgggaggctgaggcaggcggatcacgagttcaggagatggagaccatcctggccaacatggtgaaaccccatctctactaaaaatacaaaaaaattagctgggcgtggtggcacatgcctgtaatcccagctactcgggaggctgaggcaggagaatagcttgaaccaggcagttagaggttgcactgggccgagatggcgccactgcactccagcctggcgacagagcgagactctgtctcaaaaaaaaaaaaaaaaaaaaaaaagaatccaacagaaaaagggtcttcttttatatgataaaggacgggcaagcagaaataagcagaatctttggataggaacctggacgagcaagggaaaatgagcagtgtagcccaacaggacagcatcctactgtggtcagccggttctcaaaagaaactgaccagagggaggcatattccactgctttagtgcctgcctggtcagatctgggggtaagcaagagttgaggggcccataagggaagagagaagtccgaataaagtttggtcaagacaaagcagaagctaagacatgagcaattgggaacagttggtcagtttttaccaaatgaaagcacatagtgtctttgatagcaataggttgtaggtttaaggaacacacatcattctggagggtaacgagttaatctacaaaccactgaaacagagagccaaccacattttgagacagaaaatatggaactacttcactccacttgttgctagtcaaagaaaataaagtaataatccatcccagcagtggagggaaacgaaagggcaaaagggggaagaaaaaaaaaaaaggagaaatgcaatttcccatacccattcaagctatctttgggtcctgaaccactaatgttcctcctaccccagtttccaacctagccaaacagggccccacctaacaaatgcaaaaatttactaaatttgcaaatcccaaccaccaaagaatcaccttcctattggacacctagaggatataaggcaggagtcaaatctcacacccaccacaaaaagttgagtagaattcacaaggatggatgcttggatacgaatcagtaaaatatgattaaaactcaacctaaacacttctccaggggatgtggccaaactgtggcatgctggggattcagtggtcaactgaacaaccccaaggttcagattttggaggggaacctgcttttaaagagcaaaacatgttccttaccatgttctgcaagtgcagtcaacacacgcctatcgggcgctgctgggatgccaaggaaggtgatgggaattcagagattaaccaagccagttccttccccttcaggaaaagcctcaattcagggaggaaaccgaaacctaaaagccccagaacatcctctgatgtggcaagtgttcaaggagctgcggttagcgcggaggggtcccgcgagcctggatgacagcaagccgcccaccaaggtctggggaaaaatctccttctaactaaaaaaaagggacccgagtctcgcttgtcccgcgccggggtggcaagttagtgaagaaacccacgagagtgagatcccaatctacgactgcccctcccaggtcctcaatcccgggagcctgctcccatcctacgaatcgcctatcccaggcgaccccatgtcttcttcctccgcctcggggagtcagtcccgggagccccatgccgcaggccctcctgggaacccccgccgcagggctccctcccccgcctcgggtcttcctttcctcggcgcccccagcgcaggtccgccctcccgggtgcctcccgccgcagggctcgctcctcggcctcggtcctctcgtggggccccctccctcagggcgcctggcccgcgccccaggtcgccgcccttcgcccctcagcccctccggagccgctacctcggatgttcttcagcagcaccggctcttcaaagccaccgcgcctgaggaaggagcacacctgctccggaccccatgtcttgtagtcgggatggagttccaggcccggggaccagtctgcctctgcggaaggggtgtttgagggggttctcgggctgtcatcgcaacggggacgcttggagggctgctcggaatcggctcgctgcatggctacacctggcgtccggcacagcagtcaagaacctcggcgccggacccgcgcgcaggcgcactgacagcagggccctggcggggagtccaaggagtattggcagcctattggcctcctgcgcaggctcactgacagttgagcccttcgggcagggcagcctagcggctcttgccttgggctccctgcgcaggcgcaatggcagtccagtcgtcctcaaatcaatcccgccagggcgctggacgtgaacgcgaaagggcgtggctagaagcagaactgagggcagtgctggtggaaagggggaggaaagagcgcgcccggcaccgcacccccaattaggggctcgtctagtgaattgggggtattctccttcgaatgagtacactacccgccgcaccttggccgggtttcagatgccccaaacttaaaagaagcctaaaaggccgtcaggctgccagcaccttcccagtgaagaggaaaacagtcaaggtgctgaactggaagaacccggaatgatttcaaatgtgacttgagggtgtcttcattccacagtattgctggtcaactagagggccctgggatacctgttgtctggtgtccacacaggaggggacttcagacttctttccaactagagacagagccctccatcccaactgcattcccagaggaaggaaagtggccagtctgattacttaaaatttaacttctgaggacttttactgcctggttgtaacagcatgtgaaaatggcaggcattttcccatcacttaacccctctgcggcagggctcaaacttccctataaatactggtccatgcaattgcctggtaaaaggacatatcactattactgttaataaagccaacacaccttcccagcaaccaaggcatagacctgtttagggggtcaaggacgaatgaggcggaatagcttatcatcaagcagtatgaactagtggtctactggtgagccaaaatattatttgcaaacagagctttactgtgtgccaggcacggttctaagggctttacaaatataaaataattttatatttatacataatactaaatgaattaagtacattcattaaattatttaaatattaaataatttttataacttctaagggttttacaaatattgtaaagttctaagggctctacacatattacttcacttaattatcacaattaccttaggatgtaggaaaaagtaatttgccgcaggtcttcttttttttttttgagacggagtcttgctctgtttcccaagctggagtgcagtggcgtgatctcagctcactgcaacctctgcctcccaggttcaagtgattctcatgcctcagactcccaagtagctgggactacaggcgcctgccaccacacctggctaatttttgtatttttagtagagacaggatttcaccatgttggccaggctggtcttgaactcctgacctcaggtgattcccacacctcagcctcccaaagtgctgggattacacagccgtacccagctgcccaaggtcttacagctaggaaatgatgaagcctgtattcaaacccaagagatgtaacttggttccaaagtccatggtcttgataacttgccaaccactgcttgttaaagggggtttggggctgggtgcagtggctcatgcctgtaatcccagcactttgggaggccagagcactcacttgaggccaggagttcaaggccaacctggccaacatggtgaaaccccatctctactaaaatacaaaaattagccaggcctggtggtgcatgcctgtaatcccagctactcaggaggcgggggcacgagaatcactcaaatgtgggaggtgtaggttgcagtgagccaagatcttcccgttgcactccagcctgggcaacagagcaagactctgtttcaaaaataataataataaaaaataaataaataagtaaagggggttttgatataaaactattttctattatttaacccacaattttcaatggctcccttttcctgcagacccatggaggaaagtataaaggtgttcctgccaggcgcagtggctcacgtctgtaatcccagcactttgggaggccgaggcgggtggatcacctgaggtcaggagttcgagaccagcctggccaacatggcaaaaccctgtctctactaaaattacaaaaattagctgggtggccaggcgcagtagctgtcacctgtaatcccagcactttgggaggccgaggcgggtggatcacaaggtcaggagttcaagactagtctggccaacatgatgaaacccgtctctactaaaaatacaaaacaattagctgggcatcgtagcaggcacctgtaatcccagctacttgagaggctgaggcagagaattgcttgaacctgggaggcggaggttgcagtgagcttggatcgcgccactgcactccagcctgggcaacagagcgagactccgtctcaaaaaaaaaaaaaaaaaaattagccgggcgtggtggcagccgcctgtaatcccagctactcaggaggctgaggcaggagaatcgcttgaacctgggaggtggaggttgaagtgagccatagcctgggagacaaaagtgaaactctatctcaaaaaaaaaaaaaaaaaaagagttgttttccatctgcacacaaggccaggccccccaaaaaaatgccctcaaacactagagaactttgtgaaaagacctgacagttgccaagacttgcgaaaccaaaacgggataagaaaacaaatagcatatgtatgaaagacttaatctcaagtcagaaatggctgatttaaaaacttgtgtttataagacctgtggggaaacctgccctgacatcaaggtttcctggacaatagaaggtgttatagcagggtttttagtttaatcaactgtgtttgttcaaagcagctgcttttaagaatttttagttttttaatttcatttttttattttaattttaattttaattttttttgagacagagtcttgctctgtggcccagggtggagtgcagtggtgcaatctgggctcactgcaaacctctgcctcccgggttcaagcgattctcctgcctcagcctcctgagtagctgggattataggcacccgccacgacgcccaactaatttttttgtatttttagtagagacggggtttcaccatgttggccaggctggctttgaactcctgacctcaagtgatcagtgaactcctgacctcaagtgccttggcctcccaaagtgctcagattacaggcatgagccaccgcacccatccagaacttttattttctgtttttgtttgttaaaaagtataatttattgccatacttattatattttccctaattccctactttcaaggggcctttgatcttgcgctaggtcattagttacttgttcagggtcaacatggctggtaagggacagagagaggattcaaaggcagtgctccctcgctccaaagtataggctctttccagtttgccacttcatttaactcctcttacagtcctaacgatccttttccatcataattccacagcctgggaaccaacacccactggacacaggccctggactctggccatagtgagagaaatgactgctcaagctgccctcttctaaagtcaatctcagtatggttaggactagaaaaaacaataagatcaattaatttaaggcccactgcccaatgaccttgaataagcccagcaagctttccctgaccttatctatttaccttccacccagccaggcaagctgggcaattttatttctggcagcattcacctgtggtttttacatctcttcacagcttccttttcagccagtgttgctggttctcaatgccagctgccaccaccctctgcatctctgttttactgccttttatcatttactgaacttagcctcctcaagactttttttcccatctgcccaaattgcgaagctgagccaaaaaaatttttttttaagtattgattttcttacctgttaaagataatgctcaagtaggacaggcgcagtggctcacgcctgtaatcccagcactttgggaggccgaggtgggcggatcacctgtggtcaggagttcaaaaccagcctggccaacatggtgaaacaccgtctctaccaaaaatacaaaaattagccaggtgcacgtctgtaatcccagctactcaggagactgaggcaggagaatcacttgaacccggaaggcggaggggttgcagtgagccaagatcattccactgtactccagcctgggcaccagagcaagactccatctcaaaaaataaaatgaaataaaataaataatgctcaagaaagaaaacttgaaccgggtgcggtggctcttgcatgtaatcctagccccttgggagggcatggtgggtgggtcccttgagctcaggagtttgagaccagcctggacaatgtgacaaaactccgtctctattaaaaatgtaataataaaaaaaaaattagctgtgtgtggtggcttgtgcctgtaatcccagccactagggaagctgaggtgggaagatcatgtttgcctgggaagttgacgctgcaatgagctgagatcaagccactgcacttctagcctgggcaaaggaagtaagaccctacctcaaagaaaaaaaaaagaaaaagaaataaagaacactaggccaggtgtggtggcacatgcctataatcccagtactttgaaaggctgaggtgagaggattgcatgaggccaggagacagagagcaacctggtcaacatagcaagaccctgtctctataaaaaataaaaattaaaaaattaaaaaggccgggcctggtggctcatacctgtaatgccagcagtttgggaggccaaggtgggcagatcacttcagctcaggagtttgagaccaacctgagcaacatagtgagaacccgtccctacaaaaaatacaaaaattagcttggcatggtgacgtatgcctgtagtcccaactactcaggaggctgaggtgggaggatcacctgagcctggagaggttgaggctacagtgagccatgattatgccactacactccagcctgggcgacagggtgagatcctttctccaaataatagtaataataataaaattataaagagagagaaaaaaggaaacttagagccaggcatggtggctggctcctgtaatcccagctactcaagaggctgaggcaggaggatcacttgagtgcaggaggtcaaggctgcagtgagctatgattgtgccacggcactccagcttgggtgaaagagtaagaccttatctcaaaaaaataaaaaataaattaaaaaagaaagaaaccttagaaaacaaatgcacaaaatatacacacacacacagagccaaaggtcaccttttagtgtgtttgctatcagtctttttgtgttcatagatgtagaaacatatattctagttgagatgggtaggagactggcaatgagtaataataatataaataacaataataaacttagattatatggtagaagttagtgctatggaaaataaaaacagagcaaggtaagagattaggagcagaggagtgggtgggcacagtggctcacacctgtaatcccagcactttgtgaggtcaaggtgggaggatcatttgagtccaggagtttgagactagcctgggcaacttggcgaaaccctgcctctacaaaaaatacaaaaattagccgggcgtagtggtgtctgcttctagtcccagctactctggaggctgaggtgggagaatcatctgagcctgggaggcagaggttgcagtgagcccagattgcaccactgcactccagcctgggcgacagagcgagaccctgtctcaaaaaaagaaagaaagaaagaaagaaagacagaaagaggccgggcacagtggctgacgcctgtaatcctagcacttgagtaggcggaggcagggcggatcacaaggtcaggagattgagatcatcctggctaacacggtgaaacccggtctctactaaaaaaacaaaaaattagctgggcgtggtggcacacacctgtagtcccagctactcgggaggctgaggcaggagaattgcttgaacctgggaggcagaggttgcagtgagccaagatcatgccactgcactctagctctgggcgacacagcgagactccgttgaaagaaaagaaagagaaaaagaaagaaaagaggagtagagagaaggatagggtcaccgtcaccattttggatagagtttcaggataggtctttgagaaggtgacatttgagcagagagttgaaggaaatgaaagagtcagctttgcagatgtctggaagaaaagcattgcagaaaagggaaagaggaagtccaaaggtcctgaagcagaagcatgcctggatttgagcaataccaagcaggccattgtggatggggtagagtgagtaaaatgggaagtggtaagagatgaggtcaaacaatggggccaaagagctctcatgtcccatccttagggctccacatctagaggtaagagaaagcctctgctcctccagttccaacggaaaaattgcaagggaatgacttcaacaagttcatttcagcatccattgctggaccagtcactgtggacaaggtcataaaatgattgaccgaatcaggtcacatgtttaccctttgggtcacagggaaaagactacttctaggaggaaaggaattggcttcggacaaagttcccaggtatttttatacccattgaacagacgagggaatgaaactcagagaggtaaaatgactcgtccagggttacacgtgtgtgttaatattaagttcttggggtttcaccaagatctgccttgaaagctattgctcaccccggacgtggtggcttgtgccagtaatcctagcactttgggaggccaaggtgggcagatcatctgaggtcaggagttcgagaccagccaggccaacatggtgaaaccctgtctttactaaaaatacaaaaattagccaggcatggtggcaaaggcttgtaatcccagctactcagaagggcaacagagcaagaccctgtctcaacagagcgagaccctgaggcaggagtatcgcttgaacctgggaggcgaaggttgcagtgagctgagattgtgccactgcactctgcccttggtgacagagtgagactccttctcaataaaacaaaacaaaataaaggaaacaaaaaaactactatttctcttttctgcaacttgagctgagtacaaggtctgttgcttttacattgtttcagggagagaagccatctcgtcctatagagtgtattgtgactcctcgggagtgtctcagtgcttggggtgggagtgactgtgttatttggagtttgggatgctcaaacacacaaggaagtggccagacttcccttaggagcctagggtatccttgggtaaaaataagtcatgtatctttcaattaattaattaatttatttatttgagacgggatctcactctgttgccccggctggagtgcagcagtgtgaacgcagctcactgcaacctcaacctcctaaggctcaagtgatccacctacctcagtcttctgagtagctgagaccacaggcacacaccacctcacccagctaatttttacaaattttttgtagaaacgggcgtctcactttgttgcccaggctggtcttaaactcccaagctaaagcaatcctcctacttcaccctctcaaagtgctggaattgcaagcatgagccaccatgcctggcctagatccttttaaaagtcattgctaagagtcgtttataactcatatttcaaacatagcacagattcctaaactcaaatggtaattgcatcagagagtctttttttttttttgagacagagtcttgctctgttgcccaggctggagtgcagtgacgtgatctcagctcactgcaacctccacctcccaggttcaagcaattctactgcttcagcctcccaggtagctgggattacagacgcacgccaccatgctcatttttgtacttttagtggagatagagtttcaccatgttggccaggttggtctcgaactcctgacctcaggtgatctgcccacctcggcctcccaaagtggtgggattacaggcgcgacccattgcacccggcctgagccaccgtgcctggccagcgagtcttaatcccacataaatttgcttgagatcccctgtgttacaacaaaaggggaatttgccatcctaaaaccattagaagaggtttatgaagaagcaatcactatggaaagaccttaggcctttgatgagtatattcagccatttggtcaaccaaccaaaaagtctaccctatctttgtacttctgtggcaggaaaatacggtctggaggcagggaacatgaggccgattcacacttcagctatcacaggaaatatcctctccatacggcgtatgccgagtcgtacgtcaagtacatgactttgtaactttacttcatcctcttcgtttacataaggcatacaccaagtgaccagtggaaacccctagagggtatttaaacctccacaaacttttttttttttttgagacaaagtcttgctcttgtccgctaggctggagtgcaatggcacgatctcggctcactgcaacctccgcctcctgggttcaagggattctcctgcctcagcctccagagtagctggaattacaggcacgtgccaccatacccggctgattttttgtatttttagtagagacggggtttcaccacgttggccagactggtctcaaactcctgacctcaggtgatccgcccacctcagcctcccaaagtgctggaattacaggcgtgagccaccgcgcccggcctaaacccccacaaattccgtaatggggcctttcatcctctatgcccaggccactctcacactgggtagtgtactttcattttcagtaaatctcttcattccttcctcgctttgtttgtgtgttttgtccaattctctgtgcaagatgccaagaacctggacactctccaccggtaacgcttccacctacatgagccagtaaaatttccttcatttgaagccagcattatttgaattttctcttgtttgtgtgtatgttgaatttttagatttttttttctcctttataactgacagcatccctgagacactttgcaactccaatatctgacactcagctccaggtacccagtgttatctggctggctttccccttgtagtgacacttgtatgcagtccagtctactccaattcctcatcatctcacgtcctactgtctctagtgagtagcactgtccatcagccaagctcacaaagatcctttcctctgagaaattccttgtttctccctgagtggacccacagcattatggactgaactgtgacctctctgtcccctgcattcatatgctgaagcaccagacctcaatatcactatatttggagacagggcctgtaaggaggtaattaaggttaaatgagacgaatagggtaggattctggtaggagcagtgtccttttaagatgaacggacaccagagatctttcttttcctgctcacacaccaaagagaggccatgggaggacacggcaagaaggcagccttctgcaaatcaggaagagaggcctcaccaggaaccagccttgctggcccctgatcttgtaattccggcctccagaactgtgaaaaaatacattcctcttgtttgagctggtatcaaccacaggttcttcaactttcatgtaataaaaattgatgggaggcagagcaagtttcccagacaaggtgttactaggcacttattttcttttgcttttctttcttttttttttttttcgagaaggagtttcattcttattgcccaggctggagtgcaatggtgtgatctcagttcactataacttctgcctcccaggttcaagtgattctcctacctcagtctcccaagtagctgggataacaggcatgtgccaccaggcccagctaattttttgtatttttagtagagatggggtttctccatgttggtcaggctgctctcaaactcccaacctcaggtggtccacccacctcggcctcccaaagtactgggattagagacgtgagccactgtgcccggcctaggggcttattttcgaacacagagaagacagcacaagagagagagttctctgactggttccccaaagagagtcaggagagtaattttttgttgttgtgttttgagatggagtcttgctctgttgcccaggctggagtgcagtggcaacatctcagctcactgcaacctctgcctcccaggttcaagcgattctcctgcctcagcctcccgagtagctgggactacaggtgcatgccaccacacccaactaatttttgttatttttagtagagatgaggtttcaccatattggttaggctggtcacaaaatcctgacctcaagtgatctgtccgcctcagccacccaaagtgctgggattacaggtgtcagccaccatgcacagctaggagagtaattttaaagtggcaaaaagcaggaagggagtgacatttacacatgtagaggcagaaaactggggcacctaagcagtgttgggaacaggccccccaaaatctggccataaactggccccaaaactggccacagacaaaaatctgtgcagcactgtggcactgtgacactgtgacatgttcatgatggccatgacgcccacgctggaaggttgtgggtttaccagaatgagggcaaggaacacctggcccacccagggtggaaaaccgcttaaaagtgttcttaaaccacaaacaatagcatgagcaatctgtgccttaaggatatgatcctgctgcagataactagccaaacccatccctttatttcccataaggaatactattagttaatgtataatctacagaaacaatgcttatcactggcttgctgtcaaaaaatacgtgggtaaatctctgttcaaggctctcggctctgaaggctgtgagacccctgatttcccactccacacctctatatttctgtgtgtgcgtctttacttcctctagcgccactgggttagggtctccaccactgagctggtctcagcaaagcagttcggttacatgcttcttcttgcatcgcatgtctcattagcatgttaaatcttcacccctgggtgtgatttttcctattatcataatggtaggattaaggatcagtcattctcctggccttgtgtgtatgcgggtggtggggttagttttcttgagcaagatttatggtggaatgcttcttatcttcgtttcttcagatagcttgcagcagctgcaagattttgaccacaggtaaggtgccagggtggtggtggtacaaggtctggtagttagtaggtatgtctagaggaatgcaggaatgcattagtgggggtggcacaataggagacacaccgagggccgtccctaccccgtctcaaaaccacccaatctgtgatattttgttatggtggtcctaacagaggaatcatgtgtatactaccatgtgtgtgccatgcaatgtccactcctgagttgatgctctaaagttggacgttttgactcagtggttcccaaactttgggccccaggcttctgaggcattatggagctcattattaccgggagcccctgtatgtttaaggatctgatgcaggttgggcgcagtcgctgacacctgcaaccccagcactttgggagcccaatccaggtggattgctgggagcccaaggcaggtggattgccaggagtttgagaccagcctggccagcatggtgaaaccccatctctactaaaaatataaaaattagttgggcatggtggtgcacgcttgtaatcccagatattccggaggctgaggcacaagaatcgcttaaacccaggaggcagaggttgcagtgagccaagatctcatcactgcacgccagcctggtgacagaatgagatgctgacataaaaaaaaaaaaaaagatatgaaaaagatatgatccaaaataaagtcccacacatacttaatctatttcttcatgctaagtgtgctattattattaacaatatacacattgattcaagtgttaaggaaggctttgatcactttctaacattcctttctcaaaggtaaatatgttgcttgcatggtgatccttaccttgacccctgtgccaagacctgaagttattccttgcttgggacctggttatcactgtgattcagaagcaaaggaacagtagtttcagaatttctctaattctagctctgatccttatttgagagagaaataaataatttctccagttccttaaaactagtaacctaggtgggactggaagattgatctttgaagctgcatttgtgtaacatgcatattctgtttacctacattgcaacttcgagcagaccaataaacatagtaatgttgaagatgatcttattcacagtttttacaagactgagaacaccttggttattattcacattaaagaggagtaggccgggcgcagtggctcacacctgtaatcccagcattttgggaggccaaggtgggtggaacacgaagtcaggagtgcgagatcagcctggccaacgtggtgaaaccccatccctactaaaaatacaaaaatcagcctggcatggtggtatgcacctgtagtcccagctactcagaaggctgaggtaggagaatcacttgaacctgggaggcaaaggttgcagtgagccaagatcgcgccattgcactccagcctggccgacagagcaagaccctgtctgaaaaaaaaaaagaggagtattattttcagtttgggtggctgcagggaagtcaggtttcccctagcaagcatgctctgagtgtcagggaggaaactggcactagattctgagggagagatcaggtcttccttaggggaaatacccttttccttgggcaagaggttaaggtggcactgagccttcggggtgtgggtagaagctggtgctaagcctctgaggtggaaagcttagggaggtcacagtaaaggtgaggagttgggggctcccagaagacgattagggagagaaggtgcggaagacaaggaacagcaaggagagagccataagattgtgtaaagggagaagattcactggaacacattctccacccctagaaaggttggttgtgataaaaatccttcaacaagctgagtttcttctgtgtgtgataggggtgagaaggaagatttactccaaaacagaggtaacaaatgaagatgtttccaggacaaaggaagacaagcttgagaaagaaagaagacggcctgggaattcccaaaatatgggggatacttatagaaatctgagtcagcccaagactgttatcaaaagacacagtgtaggccgtgtgcaatggttcacgcctgtaatcccagcactttgagaatccgaggtaggaggattcgttgatcccaggagtttggagaccagcctgggctacataaggagaccctgtctctacaaaaaataaaattagacaggtggcggtgcatgcctgtggtcccagctactcaggaggctgaggtgggaggatcacttgagcccaggaggttgaggctgcaatgagctatgattgcactactgcacaccagcctgggtgccagagtgaaatgctgtctcaaaaaaaaaaaaaaaaaaagtgggcctgtgaaaccacagcgcttggctttgaatcctaatgtgaacttgggcaagttacttaaaaactcttgagctttaatttcttcatctgtaaaattgaaataatggctttattatagagtgttatgagaattgagcctggcacatagaaaatctgaatacatgtgagatatagttattataaaaagtatgcttgcgtccaggcagggtggctcacgcctctaatcccagcactttgagaggctgaggtgggtggatcacttgaagtcaggacttccagaccagcctggccaacatggtgaagccccatcttaccaaaaatatgaaaattagccaggcatggtgtcgcacacctataatcccagctactcggcaggctgactcagaattccttgaacctcggaggcggaggttgcagtgagccaagatagtgccactgcactccggcctgggcaacagagtgagactctgtctgaaaaaataaaaggtatgcttgggcctccttcttaaattcattaatttaacaaatatcaagtccatatttaattatttaatctacgcatcagtctataccctgggaaaaccacattaaaaaaatactgcctacatggagctcatattctagtgggggagtcagtatatgagtagataataagtgctaggacgaaaaatacaacaggataagagtgtagggaaagctgaattggtctaggaaatgtgacctgacacttgagcacaaatagcttttttttttttgagacggagtctcgctctgtcaccaggctagagtgcagtggcatggtcttggctcactgcaacctccaccccctgggttcaagcgattctcctgcctcagcctcccgagtagctgggactacaggtgcgtgccaccacgcacagctaattttttgtattttagtagagacggggtttcactatgttcatcaggctggtcttgaactccttacctcaggtgatccaccggtctcggcctcccaaagtgttgttgagattacaggcgtgagccaccgtgcctggccattaaattgttttctcttgtttaattaacttcaattctgccacttgctagatgctctcttaaaatagctgaaattattgtgtgcttagtctcactctgtccttgttttgttgtatagtattttttattttattttattttttgagacggagtctcactctgtcatccaggctggagtgcagtggtgtgatctcagttcactgcaacctccgcttcccagattcaagcaattctcctgccttagcctcctgagtcgctgggattacaggcatgcatcaccacacccggctaattttgtatttttagtagaggcaggatttcaccatgttggtcaggctgatctcgaactcctgacctcacctgatccatatgcctctgcctcccaaagtgctgagattacaggcatgagccaccacacccagcctgttgtatagtatttaaataaaaggcacatagaagaaaatagttgttgaggttttaagataatcattggtactttctctgttactctatttaaaatgatgatgagaaaaattcattgtcttactttgctaagtttggcataggagctgtcagtctttttttttgagacagggtctcaccatgttgcctaggctggagcgcagtggctcagtctcagctcactgcaatctccacctctcaggttcaagcaattttcaggactcagcctcccgagtagctgccattacaggcatgcaccaccaggcctggctaattttttttttttttttgagacactgttttgctcctgttgcccaggctggagtgagcaacaggattaatgcacatgcttgagcccactcacccaactcctgagatcttatcaggaagctgctgatcaccagttccaggtgtttctatctatcaggagactgtatcttctcctcgcactgactgtgaccaattattattttagatggacgctttttttttttttcagatggagtctcgccctgttggccaggctggagtgcagtggcatgattgcggctcactgcaacttctgcctcctgagttccagtgattctcctgtctcagcctcccgagtagctgggattacaggcgtgtgccaccatgccctgctaatttttgtgtttgtagtagagatggagtttcaccatgttggccaggatggtcttgatctcttgacctcttgatccgcttgcctcggcctcccaaagtgctggaattacaggcatcagccaccgtacctggcctcccatgttctttatatagatgagaagcctgtttttcagttaactgatgcaagggggctggacttctctcctttcaaataaaaccttgaaggtcctgatgtatattgaaaagggcggctgggtgcagtagcttgcgcttgtaatctcagcactttgatgtggggaaaagggagatcagactgttacggtgtctatgtagaaaaagcaagacataagaaattccattttgatctgtactaagaaaagttcttctgccttgagatgctgttaatctgtaaccttagccccaaccccgtgctcacagaaacatatgctgtactgactcaaggtttaatggatttagggctgtgcaggatgtcctttgttaaaaatgtgtttgcaggcagtatgcttggtaaaagtcatcaccattctccattctcaactacccagggacacaatgcacggcggaaggccgcagggacctctgcccaagaaagcctgggtattgtccaaggtttccccccactgagacagcctgagatatggcctcatgggaagggaaagacttgactgtcccccagcccgccacccgtaaagggtctgtgctgaggaggattagtgaaagaggaaggcctctttgcagttgaaataagaggaaggcatctgtctcctgctcatccctgggaatggaatgtctcggtataaaacccgatcgtacattctatttaccgagataggagaaaaccgccttgtggctggaggtgagacatgctggcggcaatactgctctttactgcactgagatgtttgtgtaaagtcaaacatgcacatccaggcacagcacctttccttaaacttatttatgacacagagtcctttgctcacatgttttcctgctgaccctctccctaccattactctatagtcctgccacatccccctcgccgagatagtagagatagtggtcaataaatactgagggaactcagagaccagcgccggtgcaggtcctcacttgctgagcgccagtcccctgggcccacttttcttcctctatactttgtctctgtgtcttatttccttttctcagtctctcatctccaccttgcaagaaatacccacaggtgtggaggggcaggcccccttcactttgggaggccgaggcaggaggatcacttgaggtcacgagtttgagaccagcctggccaacatggtgaaaccccatctctactaaaaatgcaaaaattagctgggcatggtggtacacgcctgtaaccccagctactccggagactgaggcagaagaatcgcttgaacccggaaggcagaggttgcagggagccaagattgcaccactgcactgtagcctgggcaacagagcaagactccatctcaaaaaaaaaaaaaaaagtaaaaagaaaagagcatggaggtgattagaggaattgaggaaaatttgtatttggggttcctcatcctcccagggtaacatgcagaacaaatgcttaaacagacaggaaagtccttctgttataggaggaagtgagagaaatactcatggaaagccttcacatgctcacaaaaacagcagccattggatttgagtgggcggtgttgacttgcccccttgacataaagaaggaacctccagaggacctggggcttgggataagggctcgaaaatgacaaagcgctgctaactcgaagaaaagccagtaggtagggccattaaagggccacagagtaaggccctatgtagacaaactgcttcaaaagccaccaaaaaacttggccttggagtgtaacagggatgaaaagtatttggtaagtcacaaggagctggcagagcctggcttccaactagtgcctgtcccagcaatgaaccaacagacaggggaaggttaggaggtcattgagctggtaaggtcaaaacagctacaaatttcaagggtcatccacaagggagacccgctctttgcctgctacacaaatgcaacaaaggccgcgggagcacaaatcacaaacggggattgtgtgttgaaggcagagaaggaagtcatgtgtcatgcaaagtgaaagcagagaaaaggcagacttgcttgcaaggcagacagtctggtgggtgcacaaggccatttcagaatacacacggaggaaacaagagaatagacagtgcaggatttggggaaagagctgatttttgttgaagaagcaaaggtagccccatacatgacatggtcttagcctttaccctaccactcccacaagcctcactgtcccagtgggccattagtgtctcaggtctactcagtgtggaatacaagatccttcccacccctacaagtcacccatgagggtgagctgagagattagccaagaggaccagaaccattgtggccgagaggaatcattctagaggatggttagtaaacaggagagcaaaaggggagaaggaaactgcgtatcggagttaaacgcctccagctgaagaaggcaaggtgtagaggtgtgtattagtccgttctcaagctgctaataaagacatacccaaggctggatattttataaaggaaagaggtttaatggactcatagttccgcatggctggggaggcctcacaatcacggcggaaggcaaaggagaagcaaaggcacatcctacatggcaacaggcaagagagtatgttcaggggagctcccctttattaaaccatcagatctcatgagacttattcactatcacgagaacagcacggaaaaaacccactcccacgattcaatgacctcccaccggatccctcccaccacatgtggggattattacaattcaaggtgagatttgcatggggacacagaaccaaaccatatcaaggtttcttaccactagggaatgtatcttagttgtgacaccaacgcatgttaccagcagcaaatttgtacagatctgctgcaaactcaatccttgcctctgcagaggaaagcatttggcaggggcagaagtagttttaaggcagagcaagagacagaggcaagcttaagagcaggagtgagagtttattaaaaagtgttacagcaggagcaaaaggaagcaaagcacatttggaagagggagaagtgggcaacttgggagatgcaagtgccgtgttcagcccttgacttgggggtttatacactggcgtggttccagggttttcttttctcacttgatttttcccctccccttgactgctgcatgtgcagtggtggtcagcacttgggagggtgactgcatgcacagtgcgtttactgaggttgtgcacatgctctgtaggtacaattttcctttaccagtcgaacaaccgcagaggaagatcagacatgggccattttgcctcttaatgcgccagtctggtcttaaactcctgacctcaggtgacctgcccatcttggcctcccaaagtgctgggattacaggcctgagccaccatgcccagtcaatttttgtttttagtagagacatggttttgtcattttggctaggctggttttgaactcctggcctcaagtgatctacctacctcagcctcccagactgctgagattataggcatgagccactgcacccagcagaacctatcacatttgtgatgcttttgatcacagttctgtcactagattgctagcaattagatgtatgcaatgagtaagctaactactttaacacagtggtttgaagtactgcaggcagtaatgactgaacacgaaatcacagcattttaatctgtgacatgttagagagaatgccaggactctctgcagtacaaatgttctattaactaatccttgtgctgctaaattatagggctttggctcctgggtctggaaaagacaccagttcctactaaatcttaagcactgacaccagtcaatgccttgtcttcagaccccaagaggtgacaatcaaaatgaagtgctttcatgagatatggggccagaaactgaaaccgttcaatccctctaggctcacggactattgccgaagaggtgggtgtgtgatattatagttagagccaattttgagggaaaaaattatctcagagtttttctctaaattaaacattagcatccaaagcatactgacacaaggcaggtgtctgggcccctgtatcagaataatggggttttcttgggggcattgatttgatttgtaataaaaaaaagtataggcaagttgtaatgtaatctgagcactttgggaggccaaggcaagaagattacatgaggccaggagtttgagaccagcctgggcaacatagtgatgttagagtaggtagttagacagacatgagcagggcaggaaaaggcctcaagtaatgtcaggcaaccatcaggtaactgtcagttgttaaagtgtccctctgggctgggcgcggtggctcacacctgtaatcccagcactttgggaggctgagaggggtggatcacctgaagtcaggagttcaagaccagcctggcaaaaatggtgaaaccccatctctcctaaaaatacaaaaattagtcgggcgtggtggcacacgcctgtaatcccagctacttgggaggctgagacaggagaatcgctggaacccaggaggcagaggttgtagtgagccacgatcccgccactgcactccagcctggccaacagggcgagactccatctaaaaaaaaaagtgtccatctaaaataataattggtcacagtcagtgccagaggaagagacagtctcctgatagatagaaacacctggaactggtgatcagcagcttcctgataagatctcaggagttgggtgagtgggctcaagcatgtgcattaatcctgttgcccactccagcctgggcaacaggagcaaaacagtgtctcaaaaaaaaaaaaaaaaaaattagccaggtctggtggcgcatgcctgtaatggcagctactcgggaggctgagtcctgaaaattgcttgaacctgagaggtggagattgcagtgagctgagactgccagtgcactccagcctaggcaacatggtgagaccgtctcaaaaaaaaaagactgacagctcctaggccaaacttagcaaagtaagacaatgaatttttcttgtcatcgttttaaatagagtaacagagaaagtaggaatgattatcttaaaacctcaacaactattttcttctatgtccctttcatttaaatactatacaacaggctgggcgcggtggctcacgcctgtaatctcagcattttgggaggcagaggcaggcagatcagctaaggtcaggagtttgagatcagcctgaccaacatggtgaaaccccgtctctactaaaaatacaaaattagccaggttggtgatgcatgcctgtaatcccagcgactccggaggctaaggcaggagaattgcttgaatctgggaagcagaggttgcagtgaactgagatcacaccactgcactccagcctgggtgacagagcaagactctgtctcaaaaaataaaataaaataaaataaaaaatattatacaacaaaacaaggacagagtgagactaagcacacaataatttcagctattttaaaagagtatctaggaagtggcagaattgaagttaattaaacaagagaaaaaacttaatggccaggcacggtggctcttgcctgtaatctcaacaacactttgggaggccgagaccggcggatcacctgaggtgatcaagaccagcctgatgaacatagtgaaaccccatctctactaaaatacaaaaaattagctgtgcgtggtggcccgcaccggtaatcccagttactcaggaggctgaagcatgagaatcacttgaacccacgaggcggagattgcagtgagctgagatcgcaccactgtactccaacctaggcaacagagcaagactccatctcaaaaaaataaagaaaatttttatttatttatttatttattttttgagacggagtctcgctctgtcgcccaggctgaagtgcagtggcctgagctctgctccctgcaagctccgcctcccgggttcacgccattctcctgcctcagcctcccgagtagctgggactacaggcgcccgctaccgcgcccggctaattttttatatttttaatagagacgggttttcaccgtgttagccaggatggtctcaatctcctgacctcgtgatccccctgtctcagcctcccaaagtgctgggattacaggtgtgagccaccgcgcccagccaaaaataaagaaaaaatttaagaaaattaaaaaagaaaaaagagcatcatctcccatttccaagattggtttctagatacagtaatccggtaactttcaccattagaatctttaaaccagtgcaacacttgtacatatattgattttaagtacacaaatgaaggcccaacagtgagagaaggcttaggatcaaaaatcactagaaagtctcagtttttttgttactacttaatcacttaattttaataatagtaaaacaggccaggcacagtggctcatacctgtaatcccagcgcttttggaggccaaggtggacggatcacttgaggtcaggagttccagaccctcttggccaacatggcaaaaccctgtctctactaaaaatacaaaaattagccagacatggtggcgttcgcctgtagtcccagctatttgggaggctgaggcaggagaaatgaacctgggaggcggaggttgcattgagatcgtgccactgcactccagcctgggccacagagcgggactccatctcataaaaaaagctttgtaggccgggcgcagtggctcaagcctataatcccagcactttgggaggctgaggcaggtggatcacgaggtcaggagatcgagaccagcctggccaatatggtgaaacctcgtctctactaaaaaatacaaaaattagccaggtgtgatggcacgtgcctgtggtcccagctactcaggaggctgaggcagaagaatcgcttgaacccgggaggcagaggttgcagtgagccaagatcatgccactgtactctagcctgggtgacagagcaagaatccatctcaaaaaaaaaaaaaaaagaaagttaggcaggtgaaatgctgcttgcctgtagtcccagctacttgagaagctgaggtgggaggattgcttgagcccagaagcttgaggctgcagggagctctaatcacgccactgcactccagcctgggtgacacatcgtgagcctgtctcaaaaactaataaaagtaaaataaaattaattttgaagttaagctgctccattataaaaggtcacctgtttttaattgtttattacaatttttttttacatgaaggaaattatgcaaatcttaagtcgtaaaacatgatgaatttttccagctttattacatgcaataaaatacaataaaataaacctgtcttaagtgtacagttttacataaaataaaatttacatacaataaaatacacctgtcttaagtgcacaattcgatgaattttagtgatgcatatagctgtaaaactaccaccacaaacaaaatatagaatatttccatcactctaaaaagttttctcatgccctttgatcttcttccctgccctccccacatccttcctgccacacgcccaggcaactgttgctctgttttatgtcactatgattttgcctttttgaaaatttcatgtaaatatttttatatatgcaaagtatatagtcttttgtattttagttcttttacttagtattatgtttttgagattcatctttattgcatgtatcaatatttattttctattgctgagcaatcttcctttgtaaccagttaatggatgtttgggttgtttgcagggtttgattaatatgaataactatcaatataaacatttgtgtgcagtctttcaacatttttttccctctgttgcccagactggagtgtggtggtgtgatcatggctcactgcagcctcaacttcctgggctcaagcaatcctcctacctcagcctcccaagtagctgggactacaggagtgtgctattttttttttttattttttttattttttattttttatttttttatttttttatttttttattgatcattcttgggtgtttctcgcagggggggatttggcagggtcataggacaatagtggagggaaggtcagcagataaacaagtgaacaaaggtctctggttttcctaggcagagtgtttgtgtccctgggtacttgagattagggagtggtgatgactcttaaccagcatgctgccttcaagcgtctgtttaacaaagcacatcttgcaccacccttaatccatttaaccctgagtggacacagcacatgtttcagagagcacagggttgggggtaaggtcacagatcaacaggatcccaaggcagaagaatttttcttagtacagaacaaaatgaaaagtctcccatgtctacttctttctacacagacacggcaaccatccgatttctcattctttttcccacctttcccccttttctattccacaaaaccgccattgtcatcatggcccgttctcagtgagctgttgggtacacctcccagacggggtggtggccgggcagaggggctcctgacttcccagtaggggcggccgggcagaggcgcccctcacctcccggacagggcggctggccgggcagggggctgacccccccacctccctcccggacggggcggctggccgggaggggggctgacccccccacctccctcccggactgggcggctggccgggcggggggctgaccccccacctccctcccggacggggcggctggccgggcagaggggctcctcacttcccagtaggggcagccgggcagaggcgcccctcacctcccggacggggcagctggccgggcggggggctgacccccccacctccctcccggacggggcggctggccaggcagaggggctcctcacttcccagtaggggcagccgggcagaggcgcccctcacctcccagacggggcggctggccgggcggggggctgacccccccacctccctcccggacagggcggctggccaggcagaggggctcctcacttcccagtaggggcggccgggcagaggcgcccctcacctcccggacggggcggctggccgggtggggggctgacccccacctccctcccggacagggtggctgctgggcggagacgctcctcacttcccagacggggtggcagcagggcggaggggctcctcacttctcagacggggcggttgccaggcggggggtctcctcacttctcagacagggcggccgggcagagacgctcctcacctcccagacagggtcgcggccgggccgaggcgctcctcacatcccagacggggcagcagggcagaggcactccccacatctcagacgatgggcagccgggcagagacgctcctcacttcctagatgggatggcgaccgggaagaggcgctcctcactttccagactgggcagccaggcagaggggctcctcacatcccagacgatgggcggccaggcagagacgctcctcacttcccagacggggtagcggccgggcagaggctgcaatctcggcactttggggggccaaggcaggcggctgggaggtggaggttgtagcgagccgagatcacgccactgcactccagcctgggcaccattgagcactgagttaacgagactctgtctgcaatcccggcacctcgggaggccgaggctggcggatcactcgcggtcaggagctggagaccggcccggccatcacagcgaaaccccgtctccaccaaaaaaatacgaaaaccagtcaggcgtggcggcgcgcgcctgcaattgcaggcactcggcaggctgaggcaggacaatcaggcagggaggttgcagtgagccgagatggcagcagcacagtccagcttcggctcggcatgagagggagaccgtggaaagagagggagagggagaccgtggaaagagagggagagggagagggagagggagaccgtggaaagagagggagagggagagggagaccgtggaaagaggggagagggagagggggagggtgagggagagggagagggagagagagagagggagcgagtgtgctatttttttgtatgttttgtagagacggagtcacgccatgttgcccaggttggtcttgaactcctggcctcaagtgacccatccgcctcagcctcccaaagtgctgggatcacaacaagcatgagccaccgcccccggcctgatcatacatttttatttccctttaattttgtatgtgttgggttcatgggtcaaatggtaagtatatgtcaaacttcataagatattgccatattctttcccaaagtggctactacccattttgcattccaaccagcaatgtgtaaaagttctagttgttctacatcaaggccatctttagaagtgaatcttcccagactttaaaaaacatgcatatattatgtatttttaatgtaaaaatggttcacagatatcacttaatatatcagggtcatccttgtattgtctaaattagacttctgtgacaatttttttaattaattttttttgagacagagtttcattcgtgttgcccaggctagagtgcaatggcacgatctcggctcaccgcaaccttcacctcccaggttcaagcgattctcctgcctcagccttccaagtagctgggattatagtgatgtgccaccacacccggctaattttttcgtattttagtagagacggggtttctccatgttggtcaggctggtctggaacttctgacctcaggtctcgaatttccgcccacctcggcctcccaaagtgctgggattacaggtgtgagctaccgggcctggcattctgtgacaattttaatgttgtgttccaatgtctgaatctcccattatttatgtatttattatttattttgagatggagttttgctcttgtcgcccaggttggagtgcagtggcacaatcttggctcactgcaacctccgcctcccaggttcaagcgattctcctgcctcagcctcctgagtagctgggattataggcgcccaccaccatgcccagctaatttttgtatttttagtagagacggggtttcactaggttggccaggctggtctccaactcctgacctcaggtgatccacatgcctcggcctcccaaagtgctgggattacaggcatgagccaccacccccagcctctcccattatttattaccaaacaaggcaagaaaaaagggtgaggaggattttggttggatttatttcagatattggcacttggaataaattttgtttagtgagtctaaggtttgcaaagttaaaaatcaggtattggctaatgtataacatcatgatacaggattttttttttttttttttttgagacagagtctagttctgacccccaggctgcagtgcggtggggcaatctaagctcactgcaagctccacctcccgggttcacgccattctcctgcctcagcctcttgagtagctgggactataggtgcccgccaccatacctggctaattttttgtatttttagtagagacggggtttcaccgtgttagccaggatgatctctatctcctgaactcgtgatccacccgcctcggcctcccaaagtgctgggattacaggcgtgagccaccatgcccggccgatacaggattgttaaaatactgaaggtatttcatcacataaaggtatttttggacaggcatggtggctcacgcctgtaatcccagcattttgggaggccgaggtgggcagatcatgaggtcagcagattgaggccatgctggccaacatggtgaaaccccacctctactaaaattaaaaaaaaaaaaaattagcccagtgtggtggtacacacctgtagtcccagctactcgggaggctgaggcaggagaatcgcttgaacccagggggtggaggttgcagtgagccaagaccatgccactgcactctagcctggtgacagagcgagactccgtctcaaaaaaaaaaaaagctatttgtgctcaagtgtcaggtcacatttcctagaccaattcagctttccctacactcttatcctgttgtatttttcgtcctagcacttattatctactcatatactgactcccccactagaatatgagctccatgtaggcagtatttttttaatgtggttttcccagggtatagactgatgcgtagattaaataattaaatatggacttgatatttgttaaattaatgaatttaagaaggaggcccaagcataccttttattttttcagacagagtctcactctgttgcccaggccggagtgcagtggcactatcttggctcactgcaacctccgcctccgaggttcaaggaattctgagtcagcctgccgagtagctgggattataggtgtgcgacaccatgcccggctaatttttgtatttttagtaagatggggtttcaccatgttggccaggctggtctggaagtcctgacttcaagtgatccacacacctcagcctctcaaagtgctgggattacaggcgtgagccaccctgcctggccgcaagcatactttttataataattatatcttacatgtattcagcattttctatgtgccaggctcaattctcataacactctataataaagccattatttcaattttacagatgaagaaattaaagctcaagagttggctgggcgtggtggctcacgcctgtaatcccagcactttgggaggctgaggcaggtggatcacgacgtcagcagatcgagaccatcctgggtaacacggtgaaaccctgtctctactaaaaatacaaaaaaaattaaccgggcgtggtggtgagcacctgtagtcccagctactcgggaggctgaggcatgagaatggcgtgaacccaggaggcggagcttgcagtgatcccagatcacgccactgtactccagcctgggcgacaggcgaaactcagtctcaaaataaataaataaataaataaagctcaagagtttttaagtaacttgcccaagttcacattaggattcaaagccaagcgctgtggtttcacaggcccacttttttttttttttttttgagacagcatttcactctggcacccaggctggtgtgcagtagtgcaatcatagctcattgcagcctcaacctcctgggctcaagtgatcctcccacctcagcctcctgagtagctgggaccacaggcatgcaccgccacctgtctaattttattttttgtagagacagggtctccttatgtagcccaggctggtctccaaactcctgggatcaacgaatcctcctacctcggattctcaaagtgctgggattacaggcgtgaaccattgcacacggcctacactgtgtcttttgataacagtcttgggcttactcagatttctataagtatcccccatattttgggaattcccaggccgtcttctttctttctcaagcttgtcttcctttgtcctggaaacatcttcatttgttacctctgttttggagtaaatcttccttctcacccctatcacacacagaagaaactcagcttgttgaaggatttttatcacaaccaacctttctaggggtggagaatgtgttccagtgaatcttctccctttacacaatcttatggctctctccttgctgctccttgtcttccgcaccttctctccctaatcgtcttctgggagcccccaactcctcacctttactgtgacctccctaagctttccacctcagaggcttagcaccagcttctacccacaccccgaaggctcagtgccaccttaacctcttgcccaaggaaaagggtatttcccctaaggaagacctgatctctccctcagaatctagtgccagtttcctccctgacactcagagcatgcttgctaggggaaacctgacttccctgcagccacccaaactgaaaataatactcctttttttttttttttcagacagggtcttgctctgttggccaggctgtagtgcaatcgtgcgatcttggctcattgcaacctttgcctcccaggttcaagtgattctcctacctcagccttctgagtagctgggactacaggtgcataccaccatgccaggctgatttttgtatttttagtagggatggggtttcaccacgttggccaggctgatctcgcactcctgacttcgtgttccacccaccttggcctcccaaaatgctgggattacaggtgtgagccactgcgcccggcctactcctctttaatgtgaataataaccaaggtgttctcagtcttgtaaaaactgtgaataagatcatcttcaacattactatgtttattggtctgctcgaagttacaatgtaggtaagcacaatatgcatgttacataaatgcagcttcaaagattaatcttccagtcccacctaggttactaattttaaggaattagagaaattacaggcctgagccaccgtgcccagccaatttttgtatttttagtagagacatagtttcgtcattttggccaggctggcatcgaactcctgacctcaagtgacccgcctgccttggcatcccaaagtgctgagattacaggtgcgagctactgcacctggccacccttttcaatatacatctggaccttcaaggtttaatttgaaaggggagacgtccagctcccttgtgtcagttagctgaaaaacaggcttcttgtctacataaagaacatgggaggccaggcgcggtggctcacgcctgtaatcccagcactttgggaggccaaggcaagcggatcaccaggtcaagagatcaagaccattctggccaacatggtgaaaccccatctctactacaaatacaaaaattaggtgggcgtggtggggtgcacctgtagtcccagctactggagaggctgaggctggagagtcgcttgaacccaggaggcggaggctgcagtgagccgagagtgtgccattgcactccagcctggcgaaagagcgagactccatctcaaaaaaaaagaacacagggagtgggaatatgagaaaagagataataattttgttattggaatgcttagaacaagagtcactataaggtcatggagacaatgatacagggtggcccaaaaccacaggtgcaagagaccaaagtacctacagaacagcgatgaaggcgagtccccacctataggcacaaaacagatttcccctaggacagagttgaaggctggtcccggaaatgggacaagaccagggttagggtacccagtaagcactggttcattctggagcccctaggatgaatggggggacaccctgttcagtccggtctgccataagtgcaggaaaaagatagtagggaaactagaagagatgccttttcccttctctcctctgctctctcttcacagatgggtaatcatgtctccatacaacaagacgtgcccctcggatgcatctcaagaactgggataagttcaaccccaaaccctaaaacgaaaaactaattttcctttgcaaaaccagaggaactctggccaaaacaaaagtacaaattttaattttttttttttttgagatggagtctctctctgtctcccaggctggagtggcgccatcttggctcactgcaagctccgcctcccaggttcacaccattctcctgcctcagcaacccgagtagctgggactacaggcgcccgccaccatgcccagctaattttttgtatttttagtagagacggggtttcaccgtgttggccaggatggtctcgatctcctaacctcgcgatctgcccacctcagcctcccaaagtgctgggattacagatgtgagccactgcgcccggcaaaagtacaaattttcataccgtcctccagctggacctttcctgccaccatcagggcaaatagtcagaggtcctctatttacgaaccttcatggcctgaaggaaaaaccccaatccttataaagcttgtaaggcaaaccccactgtcctagctatgcttagctgccttctccagggccctccactgggactcacctgctgactcccttctcctccaaaagccaaggggaaaaattgcctccccctcctccacaggccaaaaagtgaaaaacagccacctgcctcctcccctgtttatctcactcccagacctttggaatcagccctgccctacacaaagcccgttagttctccctccaggctctgcttgttagaggaagtaagtgagccagttggacccatccaagtcctcatctccttttcagcctggacctttggcaaattaaaaaaaaaaaaaaaaaaaaactaggaaagttctcaaatgaccccagaagctcattgaaggcttccaaatattcacccttacatttatttatttatttttttgagacagagtctcgctctgtcacccaggctggagtgcagtggtatgatctcggctcactgcaaccttcacctcctgggttcaagcaattgtcatgcctcagcctcccgagtagctgggactacagatgcatgccaccatgcccagctaatttttctattcttagtagagacggggtttcgccatgttggtcaggctggtcttgaactcctgacctcaggtgatccacttgcctcagcctctcaaagtgctaggattataggcatgagccactgtgcccggtcagcccttacatttagattaacttgaaaggacataaatatcctcctgggacaagccctctcacgggaggaaagagaaaccatctgtgaagcagccagacactgtggggatgaattacacctggcaaacgtcaactactctcgaggggctacagctgttccccaacaagaccccaattgggactacaatatccaagcaaaaatatgggccaggaaccacatgctgctgtgtctaatagagggaataaaataaagtaaggttaagtctaggaactctaataagttagccaccataaaccaggggccaaccaaaaatcccatagcctttctcgaaaggctacaggaaacccgtattaagcataccaacttaaacccagaatcccctgagggacaactagttgtaaaggaccatttctttacccaagccatcccggatatcaggaaaaattacaaaagtcagccttaggaccaagtactcctatgccagaaatcctcaaatgagcctcctcgatcctttataaccaaaatcaggacaaggaggacagggctaaggaaaacgaaaatgtagggacaagaggcaggctcaactactagctgttgtgcaagcccaccagccccctccaggttgccttcaagacactcctccaggtaactgccatcagtggggaagactaggccactagagaaggaattgcccaaaatggaaggatgccatgcatagcctgaccaatctgccataggctcggccactggaaagactgtcccaggagacaaaaggcctcccggtcagatctccacccaataatggccttgaactgaaggggctcttcactcaccagcttccaaatcagacgttgtcattaaaggaacaaagccaaggacaactctggaagtggcaggtaggactctatacatttccttcgaaatacaagagctgtctactttatgctaacctccttctccaggcagctttcctccaaatcctgtcgggtaatgggggcaagtggcacccctttctttctttcttttttttttttttttgagacggagtcttgctctgttgcccaggccggagtacaatggtgcgatcttggctcactgcaagctccacctcctgggttcatgccatttgcctgcctcagcctcccaagtagctgggactacaggtgcccgccaccacgcctggctaattttgtttttgtattgttagtagagatgggttttcactgtgttagccaggatggtctcgatctcctgacctcgtgatccgcccacctcggcctcccaaagtgctgggattacaggcatgagccattgcgcccggccccctttgtttctttttgacatctctacttaagacccgaggagccttctacatttgtggccagttatttcaccaatgcctctgcattaactggactggaatgtgtaccataggctgtgtatctccagacatcttcagagctcctggcaatctctctcttcagtaccaattaatggatctatggacattctatttttttttttttttttgagatggagtctcgctctgttgcccaggctagagtgcaatggcacgatcttggctcattgcaacctcggcctcccaggttcaagcgatcctcctgcctcagtcaccctagtagctgggattacaggcatgcacccggctaatttttgtatttatagtagagacagagtttcaccatgttggccaggctggtctcgaactcctgacctcaggtgatccacccacctcagcctcccaaagtgctgggattacaggcgtgagccactgtgcccggcccaagcatttcatcttgcccagggtgaagagggctatccaattaattccacttcttgctagatgtggcattatatccagtatgggaaccagaattgccagagtcacagaagcctccttgaccagctctcaacagacatagccaacaacattgatgccacaactaaaaccttaatagctgtgcaagaacaaattgactcgtcagcagccatagtcctcccaaatcgccaaggagtacatacgttaatggcagcacagggaagaatttgtttagccttagatgaaaaatgttgcttttggttaaatcaattgggaaaagtatacgacaacatcagacaactcgtaaattgagtctcctatgtatgggaacaaggaacaagcctctcagggttggttagattaggagggaacatggaaatggttctcctgggttgtcttcttttaggcccacttgttagtctcctacttttgcttctttttggtccatgtcttctaaatctgataacccaatttgtttcctgtcaccttctggacatcaagctccagatgaccctcagtgagggatactttcctctcaatattcaagagtcacctttctacagagcacccctagacgacccatcagtgagacacgccagaggcgaaatcctgcccatctcgcttggacctggctagatacgactttcaccaacccgcaaagccacccttgctggaatcacagaagcctccttgagattttggtccacgaagacatggaccaaaaaacagcaaaagtgggccgggtgcggtgactcatgcctgtaatcccagcactttgggaggccaaggcaggtggatcacctgtggccggaagttagagaccagcctggccaacacggtgaaaccctgtttctactaaaaaatataaaaattagctgggcgtggtagtgtgtgtctgtaatcccaggtaatcaggaggctgaagcgggggaatcgcttgaacctgggagatggaggttgcagtgagctgagattgcaccactgcactccaggctgggtgacagagtcagactccatctcaaaaaaaaaaaaaaaaaaaaaaaaaaaatcaatcaatgaccagattccccatgattgaggaattgatagaaagttgggagaggggactgaaactggtccaattgtcccatagaactgatgtcaattgtttcataggactgatgtttatggtttcttttgaataaaacaaaattgactcagtcttaaaacttaagaaaattacatttgttttgtctgagttcctttctcaggaaaccaaccagcagggctcccagacagtatctaggaacttaaactcaccaggatcactgcatgaggacagtgaggtgccagacccttcacccatcatgattctctatccaatacctgtttgaccagctcctcttccttaccccaccttaattcctatttttctgtatgaagttacatttcttccttgctatataaatgcctgaatttaattgcttagggagatggatttgagactaatctgccatctcctcaactgcagcatgattaaaaccctcttccctggcaatacttgtctcagtgatgggctttcttttcttttctttttttttttttttttgagacagaattttgcttttgttgcccaggctggagtgcaatggtgagatcttggctcactgcaacctccgcctcccgggttcaagtgattctcttgtctcagcctcccgagtagctgggattacaggtgcatgccaccacgcctggctaattttcgcattttagtagagatggagtttcatcatattggtcaggctggtctcaaactcctgacctcaggtgatctgcctgccttggcctctgaaagtgctgggattacaggcgtgagccattttgtgcccagcagtgattggctttctatgcagccagcaacaagaccaagatagaactcctggtgtttcagtaacaattcccctggagattatgatttcactggtcaagggtggagcctaggaatcagtattgttaacacgtctctcagataatcctgtccttgctcattaggaaactgcaactctaaaataaacatcaaattttgtcattgtagatctatttaaaattaaaacctcttcagtggctccctgatgtggtttagatttgtgtccctacccaaatctcatgtcaaactgtaatccccagtgttggaagagggtgtcagtttccaatctgagctggggtccaagaggagttggtggatgggtggcgggtagctgaaaaaacactctagggagtataggcagttgggacatggccttattatctctctctctcctacagagtcagcagagcagttatattttcacagacaatagtggctcaaagccaggtatgagctcacacaaacaggatacatcaaaatggctacataaatgtgattacatactgcatgcaattgtgcacctgtggtcccaacctgctgtcatgctgtactggatgtctgcctcagcccactcctgactgaagcacagccattttccttacagaggggcctggtggaaggtgattggatcatggaggcatatttccctctttctgttctcgtgatagtgatttctcacaagatctggtagtttaaaagtgtgtagcccctccccctgctctctcttcctcctgctccggccacataagatgtgcctccttccttttcaccttccgccaatgattgtaagtttcctaaggcctctccagccagcttcctgtacagcccacagaactgtaagccaattaaacctcttttcttataaattacccagtttcaggtatttatttatagccgtgagagaacaaactaatacagaaaattggtactggaaagtaggggcattgctgtaaagatacctgaatatatggaagcagctttggaattgggtaatgggcagaggttggaatggtttggagggctcggaagaagacagaaagttgagaggaagtttggaacttcctagagacttgttaaattgtgacctaaatgctgaaagtgatctggacaatgaagtccaggctgaggtggtctcagatggagatgaggaacttattgggaactggagtaaaggtcactcttgctatgctttagcaaagacactggagctttgatccagtgccctagagatctgtggagctttgaacttgagagagatgatatagggtatctggtggaagaaatttctaggcagcaaagcattagagatgtggtctggctgcttctaatagtgtatgcttatacgcgtgaataaagagttgatctacaactggaacttatatttaaaaggcaagcagagcatgaaagtgtggaaaatttgcagcctggccatgtggtagaaaagaaaaacccttgggaggccgaggcgggtggattacttgaggtcaggagttagagaccagcctggacaatgtggtaaaactaaaaatacaaaaattagccggacatgttggcacatgcctatagtcccacctacttgggagggtgaggcaggagaatcgcttgaacctggagggcggaggttgcagtgagccaagatcacgccattgcactccagcctgggcaacaagagggaaactccgtctcgaaagaaaaaaaaaaacaacaaaaaacaaaacccattttcaggacgggaattcaagctagctatagaaatttgcagaagtaaagaggagccaagtgctaatagctaagacaatgaggaaaaggtctcaaaggcatttcagagaactttgcagcagccccacccagaaaagtgggggcagaggcctaggagggaagaatggttttgcaagccaggcccagggtcctgctgccctgcgccttgcctccccagccatgcttccagtacaacctgtggaacaatgaaccaatgaaacctttctgttttgttgttgttgttgttgctttttgagacggagtctcactctgtcgcccaggctggagtgcaatggcatgatcttggctcactgcaacctccgcctcccaagttcaagtaattctcctgcctcggcctccctcccgaatagcctggataacaggctgtcaggcctctgagctgaagctcagccattataacccctgtgacctgcacatacacatctaggtggcctgcaggagccaagaagtctggagcagcaaaagaaaaaaactacaaagaagtaaaacagcgagttcctgccttaactgattaactaacattacaatattttattattgtgacttgtccctgccctaccttagctgatcaatcaactttgtgacattcttcttctggacaatgagtcttatgatctctccaccatgcaccttgtaaacccctcctctgctaacaatagataaccaccttttgctataattttccattacctacccaactcctataaagcaacccattccctatctcccttcgctgactctcttttcggactcagcccacttgcacccaagtgaataaacagctttattgctcacacaaagcctgtttggtcgtctcttcacacggactcacttgacacaggcgtccaccaccacggtcggctaatttttgtatttttaatagagacagggtttcaccatgttggccaggctggtctcgaactcctgacctcaagtgatccacctgcctcggcctcccaaaatgttgggattataggtgtgagccaccgtgcctggctgaaacctcctttctggtaaattacccagtttcagggtttttttttttttttttgatacggagtctcagtcttgtcacccaggctggagtgcagtggctcaatcttgggtcactgcaacctccgccttctgggttcaagctattctcctgcctcagtctcctgaataggtagcacacgcctgtagttccagctacttgggaggctgaggctggtggattgcttgaacccaggaggtggaggttgcagatgacaccactgcactccagcctgggtaacagtgagagtccatcttaaaaaaaaaaaaaaaaaaaaaaagaaaatttccccaggtgcagccaatgttgagaaccaccagaaataatcaagcctgagctgtttaacctggtgttgaaaacccaaccatgaaagcctcctgcctgccgaaatagccccattttctatgacacttgtgcatatgcacgctacagtccagctttgccagattatcttcaaatagggtcatctaaggatttaaaacattaaattacctgtaattcccaaacctatggtactttcacacatctaggtctttccacagtttattctcactttgtcttgaatacttttactgtcctggcaaacagttattttcccacaaggatgaaactactggctgagcacagtggctcatgtctgtaatcccagcacttggggaggcagaggcaggcggatcacttgaggtcaggagttcaagaccagcctgaccaacatggtgaaacccgtctctacttaaaaatacaaaagttagccgggcatgatggcaggtgcctgtaatcccagctactcaggaggcagaggcaggacaattgcttgaacccgggaggtggaggttgtagtcagccaagattgtgctactgcactccagcctgggcaatagagcaagactctccttttagaggttcctctggcacatgtgctgaggtagagtaaaacacttccttctttgtgctaaactacccctcttggcacagagctgtattactatacttatcatatgaggggctagcaatattatatcttgagtacaggtactatgtctggttcatctttatatcccttgcacctagccgagggtaggaacagagtaggcagccaataaatgctttttggcttagtgaaagcactcacaaggaacaaaattaaaacaagcaggaacattaccctttttataaaaaatctgaatataatctaatcatctaaccacactttttttttttttgtttgtagagacaggtgtctcactatgtttcttaggatggtcttcaactcttggcctcaagtgatccttctgccttggcctcccaaagtgctgggattagaggcatgagtcaccacacttggcccacattaagatcttaattaggaaagaatttttaaggccaggtttgtggctcatgcctgtaatcccagcactttgggaggccaaggcaggtttgagaccagcttggccaacatggtgaaaccctgtctctactaataaaaatacaaaaaattagctgggcgtggtggtgggagcctgtaatccccgctactgaggaggctgaggcagaattgcttgaacccaggaggcagaggttgcagtgagccgagatcacaccattacactccagcctgggcaacaagtgcgagacgccctctcaagaaaaaaaaaaaaaaagaatttttaagctgtaggtctcatgtggagaaatacaccttgaaagcactccaaagagagtaatgagccatttccttaattaactataacgtagttcacatgttcattccaaggccttgaaataatcctgtttcttcatatgtatctgatatggcttggctgtgtccccattcaaaactcattttgaattgtaactcccacaattcccatgtgtcgtgggaggaacctggtggcaggtgattgaattacgggggcaagtctttcctgggctgttctcatgatagtgaatacatctcaagaaatctgatggttttaaaaatgggagtttccctgcacaaactctctctctgcctgctgccacccatgtaagatgtgacttgctccttgcctttcaccatgattgtgaggcctccccagccaggtgaaactgtaagtccgttaaaccttttttactttcgtcttgggtatgtctttatcagcagcatgaaaatagactaatacagtaattttggtaccagaagtggggtgctgctgaaaagatacctgaatatgtggaagtgactttggaactgggaaataggcagaggttggaacaatttggagggtcagaagaagacaggaaaatgtgggacagttttgaatttcctagaaacttgctgaatggctttgatcaaaatgctgataataatatggacaatgaaattcagcatgaagtgctcttagatggagataagaaacttgttgtgaactggagcaaaggtgactcttgttatgttttagcagatctactggtggcattttgcccctgccctagagatctgtggaactttgaacttcagagagatgatttaaggtatctggtggaagaaatttctaagcagcaaagcattcaagaggtgacttgggtgctgttaaaggcattgttatttttatttttattttttgagatggagtcttgctctgtcgctagctggagtgcagtggcacgatctcagctcactgcaacctctgcctcccgggttcaagcatttctcctgcctcagccttctgagtagctgggattacatgagtgcaccaccacacccagctaatttttgtattttttagtggagacagggtttcatcatgttggccaggatggtctcgatctcctgaccttgtgatctgcccaccttggcctcccaaagtgctgagataacaggtgtgagccactgtgcccggttggcattcagttttataagggaagcagagcataaaagttcagaaaatttgcagactgacaatgtgatagaaatgaaaatcctggctgggcatggtggctcacgcctgtaatcccagcactttgggaagccaaggcaggtggattacctgaggttgggagttcaagaccagcctgaccaaaatggagaaaccccatctctactaaaaatagaaaattagccgggcttggtggtgcatgcctctagtcccagccacttgggaggctgaggcaggagaatcacttgaacctgggaggtggaggttgtggtgagctgagtttgcgccactgtactccagcctgggcaacaagagcaaaactccatctcaaaacaaaaaacaaacaaacaaagaaaatcccattttctgaggagaaattcaagctggctgcagaaatttgcataagcaatgaggagctgaatgttaatcaccaagacaatggggaaaatgtcttcagggcatgtcagaggtcttcatcacatccccccgacattcacaggcctggaggtttaagaggaaaaagtggttttgtgggctgggcccagaatccccttgctggttgcagcctgggaacttggtgccctacgtcctagctgctccagccgtgactgaaggggtcaatgtagagcttgggccatggcttcagagcatgtacgcctcaagccttggcagctttcacatggtgtgcacagaagtcaaaattgaggtttgggaacctctgcctagatttcagaggatgcatgaaaatgcctggatatccaggcagaagtttgttgcagggacagggctctcatggagaacctctgctagggcagtgtggaaaagagatgtggggttggagtccccacaaagagtcgctactggggcactgcctagtggagctgagagaagagggccactgtcctccagaccccagaatgatagatccactgatagcttgcactgtgtgcctggaaaaatcgcagacactcaacaccatcctgtgaaagcagccgggagggaagctgggaggtaaagccacaggggtggagctgcccaagaccatgggaacccacctcttgcattagcatgacctggatgtaaaacatggagtcaaaagaggtcattttggagcttttaagatttgactgccccactcaatttcagacttgcatggggcatgtagcccctttgttttggccaatttttctcatttgaaatggctgtatttacccagtgcccatgcccctgttgtagctaggaagtaacttacttgcttttgattttacaggctcatagatggaagtgacttgccttatctcagatgagatgttgaactgtggaggtttgagttaatgctgaaataagactttaggggactgttaggaaggcatgattggttttgaaatctgaggatgtgagatttgggaggggccaggggcagaatgatatggtttggctgtgtccccacccaaatctcattgtgaattgtaactcccacaattcccatatgttgtgggagaaacccagtgggaggtgattgaattatcgggtcaggtctttcctgggctcttctcctgatagtgaatgtgtctcatgagatctgattcttttaaaaacgggagtttccgctgggcatggtggctcatgcctgtaatcccagcactttaggaagctgaggcaggtggatcatgaggtcaagagatcgagaccatcctggccaacatggtgaaactccatctctacaaaaatacaaaaattagctgggcgtggtggcacacgcctgtagtcccagctacctgggaggctgaggcaggagaatcacttgaacccgggaggcagaggttgcagtgagccaagatcccaccactgcactccagcctggtgacagtgcaagactctgtctcaaaaacaaacaaataaacaaacaaacaaacaaaaaacaggagtttccctgcacaagctctctttgcctgccaccatccatgtaagatatgacttgctcctccttgccttttgccatggttgtgaggcctcccagccacgtggaactgtaagtccattaaacctctttttcttcccagtctcggttggatatttctttatcagcagtatgaaaatggactaatatagtatctaagacttaaaaaaaaatttaaggtgaaatcaagacttaaaaaaaaatttaaggtgaaatctacataacacaaaattaaccatttttaaatgtccaatacagtggcatttagtaaattcacaatgttatgcaactacaccacctctatcaagttccaaaatagtttcatcactccccccccaaaaaactctgtatccattaagcagttatttttcattttccccctagaccctggaaaccacaggaacattaacttttaagttattctaaggaattttagagacatagatattaaaacagacagatttcagatggctgtgcaactgcttccagtcatacagaaaagagttttttttcaataatctcaattccaatttttattagccattctatgtacattgataccaagtcctgaaaactgataaaaacatgtccagaatttctttttttccttttctgagaaagggtcttgccctctcacctaggatggagtgtagtggtgcaatcacagctcactgcagcctcagaatctcccagtctcaagtgatcctctcatgtcagtctcctgagtagctgggactacaggcacatgccatcacacccaactaatttttttattttttgtagagatgagggctatgttgcccaggttagtcttgaactcctggactgaagcaatcctcctgcctcagcctcccaaagtgttgggattataggcatgagccacaggacctggcccatggtttcttatacagtcaatgtacaaatgctcatttatattttgcacaataatgaagataaaaataacaattatagcaacatacaaatatgtacaaagattccagacagactttgttttttggcttataacaatgtgtagatactacacaaagaatgaggatgtaattttcatttacaagcaaaatgtgaccaaaatcccttttcttcttaaaattgaaaaatgaaattcttgagaatactaattagtgacggccaaatcttagactattttaaattagccatggttaaacataggtgagttaaacattgtgcctttccaaaattaaggtttgcagttagaaacataaacatttgataaaacttctcaaaattaattatgagtggcttattcatgtcctttggattccagacacacactagaaaaagtaaacgttaaagaggtgatattttggaaagcatccctagtactgaaaagcatccctagcactgaaaaaagcatccctagtactgaaaagcatccctaacactgaaaaaagcatccctagtactgaaaaacatcttcaggagtactcagtactccctagtacatccctagtactgaaaaaagcatccctaatactgaaaagcatccctagtactaaaaaacatcttcaggagtacccagtggtcaaacactagcaggaaactcatgatgcactaacaatactgagaacaaagtgtgggaagtaataagcagctattttactgatgtattaaatatattagaattatgaggcatgagatgatatttatgtgatttttaaaaggtttaaaatattcttagggactcaattagatattgagaatgactgataactatgatctcaaaaacagtatatcacacataatcatggtgttaccttactaataggaatttagtttttaataactaactgaattttattttactggcttcagaagcagctgcctattttgagaactacatgagttaatacgatcatatataattaagttaatgtcacagaaaccaaaatgataatagtttacaaaagaagaaagtgccccatttattgggttgtgacatcaggctgagatggcttagggctggaaagcaaggatgagtgtagcactggggctcaggtacaaatctgtttataaagctcaaggagagaaaaggcacgagaaggggtgagacaactctgaatggcggtggtacctggatgtggaattaccacagtgggccagagacaggatggtatataaccctctggccaggtactatgggaaccaaccccttccttcaatattaaattaagaatacaaatatctcaaagcatgctatcaaaagtagattatttatcctcatattacagaacacagaaggagacatttatttttaaaagagagctaaaaagttatggggtttctccttatttcatcttgaaaactcaaggagcaaacattaaaaaaaattccctatttatatatatatatatattttttgagatggagttttactcttgttgcccaggctggagtgcagtggcgcaaccttggctcaccacaacctccgcttcctgggttcaagcaattctgcctcagcctcccaagtagctgggattacaggcatgcgccaccacacccggctaattttgtatttttagtagagatggggtttctccatgttggtcaggctggtctcgaactcctgacctccggtgatctgcccgccttggcctcccaaagtcctgggattacaggcgtgagccacagcgcctggccggactattagtatttttaaaaggcacttaaaatattcctttccaatccaactcaaaatacatctctgtcaactacattttggataaatattttaaaaagcacataatttttgtgcaattttttcttataacccagtgatatttatcatctatagggctaaaaggtttgaaggacagagctccaactttctgcagaacaatctgaaagtgcttttatcatagaaacaagaacaacattaatgatttgctctttcactgacaacatcctgtagtcgtttcagtaaaacgtcatcattttcttgacagacgcgtttggcaggggattctgcatcactatcgatggctattactcgcttcttggttctctgctcaccttgccttatcatgttgttgatatctttcaaactctgtgcagaaatagagaacgtgtgtgagtaaaagagggagaggggaaatggcagcaaacaaccaagctaattgttttttcctgtgctctatcctctatccaaatcttaacactgggataaggactctttttaaaacttagaacaacctaataagggatggcttgaactaatcttttcaggtggtttaaaaattagatttaaggccaggtgtggtggcctgtaataccagcactttgggaggccaagatggttcaatcacttgagcccaggagtttcagaccagcctgggcaacatggcaaacctggtctctacaaaaaatacaaaaattagccaggtgtggtggcttgtgcctgtagtctcagctactcgggaggttaaggagcatcacctgagcctggggaggttgaagctgcagtgagcagtgatcatgcctgggaaacagagtgagaccttgtctcaaaaaccaaaccaagaatagaaaaataagcttcccgtctccctcctctccctctccctcctctccctccctcctctccctctccctcctctccctctccctctccccacggtctccctctccctctctttccacggtctccccctgatgccgagccaaagctggactgtactgctgccatctcggctcactgcaacctccctgcctgattctcctgcctcagcctgccgagtgcctgcgattgcaggcacgcgccgccacgcctgactggttttcgtatttttttggtggagatggggtttcgctgtgttggccgggccggtctccagctcctaaccgcgagtgatccgccagcctcggcctcccgaggtgccgggatggcagacggagtcgcgtttactcagtgctcaatggtgcccaggctggagtgcagtggcgtgatctcggctcgctacaacctccacttcccagctgcctgccttggccccgcaaagtgccgagattgcagactctgcccggccgccaccccgtctgggaagtgaggagcgtctctgcctggccgcccatcgtctgggatgtgaggagcctctctgcctggctgcccagtctggaaagtgaggagtgtctctgcccggccgccatcccatctaggaagtgaggagcgtctctgccaggccgcccatcttctgcaatgtggggagcgcctctgccctgctgccccgtctgggatgtgaggagcgtctctgcccggccgccccgtctgagaagtgaggagaccctctgcctggcaaccgccccgtctgagaagtgaggagcccctccgcccagcagccacaccctctgagaagtgaggagcccctccgcccggcagccactccgtctgggaagtgaggagcgtcttcgcctggcagccaccccgtctgggagggaggtgggggtcagccccccacccggccagccgccccgtccagaagggaggtgggggggttagccccccgcccggccagccgccccatccaggagggaggtgggggggtcatccctctgcccagccagctgcccgtccgggagggaggtggggggggtcagcccccccgcccggccagccgccccgtccgggaggtgaggggcgcctctgcccggccgcccctactgggaagtgaggagcccctctgcccggccagccgccccgtccaggaaggatgtgggggggtcagccccgggcccggccagccgccacatccgggaggtgaggggcgcctctgcccggccgcccctactgggaagagaggagcccctctgcccggccagccgccccgtccgggagggaggcggggaggtcagccccccgcccggccagccgccccgtccaggagggaggcgggggggtcagccccccgcccggccagccgccccgtccgggaggtgaggggcgcctctgcctggccgcccctactgggacgtgaggagcccctctgcccggccagccgccccgtccaggagggaggtgggggggtcagccccccgcccggccagccgccccatccgggaggtgaggggcgcctctgcccggccgcccctactgggaagagaggagcccctctgcctggccagccgccccatccgggagggaggtggggggggtcagccccccacccggccagccgccccatccgggagggaggcggggaggtcagccccccgcctggccagtcgccctgtcccggagggaggcgggggggtcagccccccgcccggccagccgccccgtccgggaggtgaggggcgcctctgcccggccgcccctgcccggccgcccctactgggaagtgaggagcccctctgcccggccaccaccccgtctgggaggtgtactcaacagctcattgagaaccggccatgatgacaatggcggttttgtggaatagaaaggggggaaaggtggggaaaagattgagaaatcggatggttgccatgtctgtgtagaaagaggtagacatgggagacttttcattttgttctgtactaagaaaaattcttctgccttgggatcctgttgatctgtgaccttacccccaaccctgtgctctctgaaacatgtgctatgtccactcagggttgaatggattaagggtggtgcaagatgtgctttgttaaacagatgcttgaaggcagcatgctcgttaagagtcatcaccactccctaatctcaagtacccagggacacaaacactgcggaaggctgcagggtcctctgcctaggaaaaccagagacctttgttcacttatctgctgaccttccctccactattgtcctgtgaccctgccaaatccccctctgcgagaaacacccaagaatgatcaataaaaaagaaaaaaaatggaaaaaaaaaaaaaaagaaaaataagcttcccattatgcaagagtcctatggcctttgtgctttcctaccctgtgaactaagagtctaaatctgtgaaaagatgtccatgaggtagagttgaattaaaatagcaggttgcagaacaataaaaaaaaaaaaaaaaaaaaaaaacaaaccaaaccaatccaaaccaaaacaactgaatttactgtataacagtagctctcgatgtgtagtacccagaccagaagcagcagaagcatctagaattttttattttttgagacagtctctctctgttgcccaggctggagtgcagggcatgatcttggctcactgcaagctctgcctcctgggctcaagctattctcctgcctcagcctccctagctgggactacaggcacatgccaccatgcctggctatttttttgtctttttagtagagacagggttttgccatgttggccaggctggtcttgaactcctggcctcaagtgttcccccaccttgggctcccaaaatgctagaattacaggtgtgagccaccgtgcctagccttatctgttttttttttttttttttttttttgagactaagtcttgctcttgtcgcccaggctggagtgcaatggcacgatctcggctcactgcaacctctgcctcctgggttcaagcgattctcctgcctcagcctcccaagtagctgggattacaggtgcccaccaccatgcccggctaatttttgtatttttagagacggggtttcaccatgttggccaggctggtcttgaactcctgatctcgtgatctgcctgcctcggcctcccaaagtgctgggattacaggcatgagccaccgtgcccggccctaatctgttttaacaagccctcccaatgattttaaagctccctacagtttgagatcttcttccttagagtaatgattttcaacattttttttttttgagacagagtctcgttctgtcgcccaggctggagtgcaaaggggtgatctcggctcactgcaacctccgcctgccgggttcaagtgattctcctgcctcagcctccacagcagagtagctgagattataggtgcgcaccaccatgcctggctaattttttgtatttttagtaaagacggggtttcaccatgttgcccaggctggtcttgaactcctgagctcaggcaatctgcccgccttggcctcccaaagtgctaggattacaggcttgagtcactgtgtccagtcaggtatattatcttagccaactttgtcaagtatagtaggaactctgtagttatctgtataactgaataggaaagtaataagaaggagccactgtatttggacagagttacaatctgccccactacaatttcttccagtttatactgattctgacttctggagacatactgaacatatctgcttgatagtccatgaagtctctgaaaacagcaatcatgtccataccacatcttcaccactgaacaaggataaggatggagatgatcacagagttgtctatgtacgtaagaggaggcttgtgttttcagacatcttcctatcctgggtgccatctaccaaatgcactttcacttccaatgcctttctttcaacttgacatcccccaggtctgaccacttgcaggtgttgccttactggtcccttctcaagatcttgcttgaacaggaaaacatgctggactttcaaagtgaactccacaaataccatgtcaataataatggattaaactacctcaaactgaatatactgctcttgatgagaggagacatgccatagttaacatttcatattttattagtatagtagtaacttggccaaaaaagaaaaaaaaaaaaagaggcaggattaacagttactgactgttaatctgaaatccaacttttagcctattcaccttaccttagaagggctgccattgaacttgtacagcagagcgcttcttggtgtaaggcctgacccattcttgtgcggggaaatataaatggagtgctgctgggaaatgcggcgtggtgagcctggctgttgtttaatatgtggaaaaggagagagtggtggagcatccatctaaaataacccaaaagtcagattttttagataaaagtttttctttgtttttgaatcccatatttttattcttatggtatcttctagttagaaaacagttatactgtaaaaagctcatttatggttgagaaaaaaaatgatcctttacttcttcttttttttttttaacaacaatagataaactagaatttattttcctgaatctttttttttttttgagatggagtatctcttgctcttgttgcccaggctggagtgcgatggcgcaatctaggctcactgcaacctctgcctcccaggttcaagcaattctcctccctcagcctcccaagtagctgggattacaggcatgtgctgggattacaggcatgtgccaccacgcccggttaattttgtatttttaatagagatgaccatgttggccaggctggtctcgaactcctgacctcaggtgatccacccaccttggcctcccaaagtgctgggattacaggtgtgagccactatgcccggcctattttcctggatctttcaggaagtcctataactagtattaagaattctggccaggcacagtggctcacacctgtaatgccagcactttgggaggctgagatgggcggatcacctgaggtcaggagtttgagaccagcctggccaacatggtgaaactccgtctccactaaaaatgcaaaaattagctgggcgtggtggcatatgcctgtaatccgagctatttgggaggctgaggcactagaattgcttgaacccaggaggcagaggtgttgcagtgagcccagattgtgccactgcactccatcctgggtgacagaccaagactctgcctcaaaaaaaaaaaaaaaaaaaaaagaattctggggccgggtgcagtggctcactcctataatcccagcactttgggaggccaaggtgctcggatcacttgaggccaggaattggagaccagcctggccaacatggtgaaaccccacttcagcctcctgagtagctcctaaaaatataaaaattagccaggtgtggtggcgtgcgcctatagtccctgccactcgggaggctgagcatgacagttgtttgaacccggggacagaggctgcagtgagctgcgattatgtcactgcactcctcctggggtgacagagtgagactctgtctcaaaagaaaaaaaaaattctggacaagacaccaggagttaagccacgagcatgagaacctcatattcatgcttaaaaagtaaggacaggctgggcgcggtggctcatgcctgtaatcccaacactttgggaggctgaggcgggtggatcatgaggtcaggagttcaagaccagcctggccaagatggtgaaactctgtctctactaaaaatacgaaaatcagctgggcgtggtgacaggcgcctgtaatgccagctactcaggaggctgagttacagaattgcctgaacccaggaggcagaggttgcagtgagctgagattgtgccacttgcactccagcctgggcaacagagcgagactccttctcaaaaaaaaaaaaaaaaagtagggacaaagagtaaccaatcttctaacacttgctgtaacaagctctctctacacacatacctgctcacaaccaaagcagtagcagagagaataaaagaggcagagaattctattagccagcaggatgattccaacgtggaaaaaatctgttaatgaaatgggaaagacttcatatggaaatggaaaagatttataaataagttggatgagcaaggatttcatttttaatatcctgtataatggaaataaattaagatggtagagatattccgagtatagcacatgacagaggggaagtgaaactgaagcaggatgaacagttatgacctctgaggatagtcatagaccatattccatgaaaagaggaagaacagaaatctacagaggcacatagatacatagaaacagctattggctgtccggctgcagcttctgctagggccttcttttcttttttttttttctttctttttttttttttttttttgaggcagggtcttgctctgttgcccagactggagtgtggtggtgcgattgtggctcattgcagccttgacctcctgggcccaagcgatccacctaccttagcttgctgagtagttgggactaaaggtgtgtaccagccactacacggctagtttttagtttttttttttaagagacagggtcttcctgtgtttctaggctggtctcaaatttctgggctcaagcaatcctccaggcttagcttcccaaagtgctgggattacaggcatgagccacagcacctgacctccttttgttttttttttgagacagagtttccctcttgtcacccaggctggagtgcagtggcgcgatctctgctcactgcaacctccgctttctgggttcaagtgattctcctgcctcagcctcccgagtagctgggattacaggtgcctgccaccacgcccagctaatttttggtagagatgggatttcaccatgttggccaggctggtctcaaactcctgacctctggtgatccgcccgcctaggcctcccaaagtgctgagattacaggcatgagccaccacacctggccccttttgtctttgacttgagaaaaacattaatctcacaatataacaacagaaaaatttaccaaatttgctgggtgcagtggctcatgcctgtaatcccagcactctgggaggccgaggtgggcggatcacaaggtcaggagttcaagaccagcctggccaacatggtgaaaccctgtctctactaaagatacaaaaaattagccaggtgtggtgacacactcctgtaatcctagctactagggaggctgaggcaggagaatcacttgagcccgggaggcagaggttgcagttgagctgagatcgcaccactgcacgccagcctgggtgacagggtgagactgtctcaaaaaaaaaaaaaaaaagaaaacaaaaaaaacaaattagttgttttaatattcatgttcccatcaagttcttacccatatgtatacggaatttctagcaacataatcatggtatagataaaattcatgccaggcgtggtggttcacacctgtgatcccatcactttaggaggctgaggtgggtagattgcttgagtccaggagttcaagaccagcctggccaacatggtgaaaccccgtatctactaaaaatacaaaaaaattagctaggcgtgggggcatgtggctgtcgtaccagctatttgggaggctggggtgggaggatcgcttgaggcctggaagcaagggttgcagtgagcccagatctcgccactgcactctagcctgggcaacagatcccatgatttcctctggtctctgttgtaccatagccttaatcactgattaagttactggacatgctctgattaattgctagtaattttacttggacatatttatctagcaaaataaacttatagtaatccaactatgacagcaaataataataaagtagtaaaacatagaacataccatatggtcctgattcgccaagtcgtatttcagtgcaaatgacttcactcttcctacatatattgtattgtaaaattttataagatcacctctttcctctttcactggtccactggaacagtcaggtgtttttgtagcatcttctaagtctgttaaaaagaatgcaatgttgtgatacaaagcatactttttatttttttgagacagggtctcactttgtcacccagggtggagtgcagtggtgcaatcttggctcactgcagccctgacctcctggattcaagtgatcctcccatctcagcctcctgagtagctgggaccacaggcacgtgccaccatgcctggctattttttatttttagtagagacggggttttgccatgttgcccaggatggtttccaactcctgggctcaagtgatccaccagcctcagcctctcaaagtgctgggattacaggcatgagccaccatgcccagccacaaagcatactttaatatacaagttggtgatttaaatgacctttctacaatattaaaaaaaacccacaaatctttatgtagagaaattaatattttcagagaaggttcagcaatccatctgtattacttataagtcaaattggaatctagagaaatgcaaacatatgaactgaaggtggtgctcttttctctagattccacttcagaatgttttcacaaccatagctgttgagctcactgtcactagtggctcttagaggggtaacagccctgggctggtgtttagctaagttctacagtatgggaggcagtggcaaacctcagcttcagacaactaaaaggcctgcagatattcttcttgtgtctttgagaaaggtggaaagattctaaaaggtaaagcatatcctgagaggttaaggaagaagcaaaatgaattacatttatttctctgcaaatacatggcaggtgacaggtgttctaagagccttattgtaccacatacaacaggaaccctgatcaggaaccagtgttcaggttttactgagcaccctcaattgtaaaataacagcttaccccaacatagtttcctacttaatggtgcaactctgggatagcttgtgaaaccaggcagaactttgtcctactattttttggggaaggaagagtattacagggtattacaaactatcatttacttgtatacacaagaaccatgtgctaagaaaaccactaccaattaaaaagaatttagcacatatatgaaaaaagctctcattctcaatacactggcctacaaacattgagaacatgggtagaagcaatgccttcaccttaggaaaaccagaaaacacaaacatggttcaaaaaccaaacagccccaggggatgtcagtcttaatttggatgtctttttcacttctgctatttctaaaggatcttgacgagggtgggaggggaggggagctatgtggttaaataaagttgaggaaatgctgtatattatattggaaattcagaaattcatgttagtataaggctctgagaagtactgcagttggggaaaaaaaataactctcatgttcactttaattccatacttccccagttttttgtgtatagtctctcttcccccaaaacactttttttttttttgagacggagtcttgctctgtcacccagcctggagtgcagtggtgcaatctcggctcactgcagtctctgcccgctgggatccagcgactctcctgcctcagcctcctgggtagctgggattacagaagcatgccaccacgtctggctaatttttgtattttcagtagagatggtgtttcgccagctggaaaggctggtctcgaactcctgacctcaggtgatctgcccgccttggcctcccaaagtgctgggattacaggcgtgagccactgcgcctggaccccccaaaacacttatactaccattctgggaaacactgtttcaaaggatactggcttgttaacagctcttctaggttattctcattatatggatcaattaaaattatttttttgttttgtttttatgaaaggttcttgatcctcttgcctcagtctcccgagtagctgggactacaggtgcacgctgccacaccgagctaatttttttttactttttgtagagacagggtctccctatgttttctaggctggtctctaactcctgggctcaagtgatcctcccaccttggcctctcaaagtgctgggattacagacatgagcgaacacgcctggtctaaaattatttaatgtcctccttagattagaaatttcttgagacagagactatagtgtctctatatttctgtgtcattccaattccagctgttaatactaacataaggtaaggagctatactttacttgaatgaaccaaacatttaaaattgtgggaggctgggtgtggtgaaaccctgtctctataaaaatttttttaaaaattaaagaaatttaaaaactaggtgtggtggcatgcacctttagccctagctacttgggaggctgagatgacaggatcgcttgaacccaggaaatcaaggttgcagtgagctatgattgccccattacattccagcctgggcaacagagcaagatctcatctctaaaattaaaaaaaaactgaagaaaaaaaagacatttaaaaaaacatacttggccgggtatggtggctcatgcctgtaattccagcactttgggaggctgaggtgggaggatcacttgagcccaagagttcaagaccagtctgggcaacacagtgagaccccatctcggtctcccaaagtgctgggattacaggtgtgagccaccatgtccggccagaaatgggtttttactgatgaaaatagtgaatgtttattaagtgtgactaatgctaaaaaagccatactcattaatacaataaatttgatattgcttataaataatagctattactaaggccttactatgaacaagccctgtattaaatattatatatatgcatatatgtatacatagttgtgtattgcataatgatgggttatcttctcagaaatgcattgttgaaatgattttgtcatgagaatactatagaatatacttacacaaacctagattgtatggccaactacacacctaggctggatggtatagtatattgctcctaaggtacaaacctgtacagcatgttactgtattgaataccacaggcaattgtatcacaatggcaagtatttgtgcatctaaatatatctaaacatagaaaaggtacagtaaaaatacagcactataatcttataggaccactgttgtatgtgtggaccatcacggactcaaacatcattatatggcacatgactatgtgtgtgtgtgtgtgtgtgtgtgtgtgtccacacatacatacatatacatataattatcttttttatttttagagacaagatcttgctctatcacccaggctgaagtgcagtggtgcaatcatagtgcactccaatctcaaattcctggattcaagtgatcttcctgcctcagcctcccaagtagttgggactacaggtgtgagccaccatgcccagctaattttttattttcattttttgcagacaggggtcttgctgtgttgctcatgctggtctttaatttccgggctcaagggatcctcctgcctcagccttccaaagtgctgggattacaggcatgagccacaacactcagcctaaatataattctttttaatccttaaaacaagtttctaaggaagcaatgtaaagttttcaattaactacaatacacttgagtacagtgttatgtttgtgttacttaggttaagctataacctgggtctcacaagtattctaatcaagactgccactctggagcagtctgctaacatgacattgaagaattcacagcccatgaggagtgagctggtgttttaatcaggaaattcattctccactccaacagtttctgctaggcatatctcagtcaatgaccaatgctttgctcattaacatactcaaggtcagaatttttttttttttttttttgagaaagagtcttgctctgttgcctaggctggagtgcagtggcacaatctcagctcactgcaacctcagcccccagggttcaagcaattctcttgcctcagcctccgaagtggcagggattacaagtgcttaccaccatgcctggctaatttttgtatttttagtaaagatggggtttcaccatgtcggcaagactggtctcaaactcctgacctcaagtgatctgcccgcctcggtctcccaaagtgctgggattacaggtgtgagccaccatgtacagccagaaatgggtttttactgatgaaaataatgaatgtttattaagtgtgactaatgctaaaaatgagctcatgttcaggaaatcaaaagtatttaagataagcagattggttaaaatatttgactccctctcccactccctctccccacggtctccctctccctctctttccacggtctccctctgatgccgagccgaagctggactgtactgctgccatctcggctcactgcaacctccctgcctcagcctgcccagtgcctgcgattgcaggcgcgcgctgtcacgcctgactggttttcgtatttttttggtggagacggggtttcgctgtgttggctgggccggtctccagctcctaaccgcgagtgatccgccagcctcggcctgccgaggtgccgggattgcagacggagtctggttcactcagtgctcaatggtgcccaggctggagtgcagtggcgtgatctcggctcgctacaacctccacctcccagccgcctggccttggcctcccaaagtgccgagattgcagcctctgcccggccgccaccccgtctgggaagtgaggagcgtctctgcctggccgcccatcgtctgggatgtgaggagcccctctgcctggctgcccagtctggaaaatgaggagcatctctgcccggccgccatcccatctaggaagtgaggagcgcctcttcccggccgccatcccatctacgaagtgaggagcgtctctgcccggccgcccatcgtctgagatgtggggagcgcctctgccccgccgccccgtctgggatgtgaggagcgcctctacccggccgcgaccccgtctgggaggtgaggagcgtctctgcccagccgccccgtctgagaagtgaggagcccctccgcccagcagccaccccgtctgggaagtgaggagcgtctccgcccggcagccaccccgtccgggagggaggtgggggtcaacccccgccaggccagccgccccgtccgggagggaggtgggggggtcagccccccgcctggccagccacccagtccgggagggaggtgggggggtcagccccctgcccggccagccaccccgtcagggaggtgaggggcgcctctgcctggccgcccctactgggaagtgaggagcccctctgcccggccagccgccccgtccgggagggaggtggggggttcagcccccccgccagccagccgccccgtccgggagggaggtgggggggtcagccccccgcccggccagtcaccccgttggggaggtgaggggcgcctctgccctgctgcccctaccgggaagtgaggagcccctctgcccggccaccaccccgtctgggaggtgtacccaacagctcattgagaacaggccatgatgagaatggcggttttgtggaatagaaaggggggaaaggtggggaaaagatttgagaaatcggatggttgccgtgtctgtgtagaaagaggtagacatgggagacttctcattttgttctgtactaagaaaaattattctgccttgggatcctgttgatctgtgaccttacccccaaccctgtgctctctgaaacatgtgctgtgtccactcagggttaaatggattaagggcggtgcaagatgtgctttgttaaacagatgcttgaaggcagcatgctcgttaaaagtcatcaccactccctaatctcaagtaccccgggacacaaacactgcggaaggccgcagggtcctctgcctaggaaaaccagagacctttgttcacttgtttatctgctgaccttccctccactattgtcctatgaccctgccaaatctccctctgcgagaaacacccaagaatgatcaataaaaaaaaaaaaaaaaaaaatttgagacactaccctcaatagccatgaaagggatgaaagatccagtgaagtctctcagctttactcttagggataataatgttaaggctaaaagctctgagaagtcctgtgtccagccctgaattctgatccacggtatttgcttgatggtagccttaaggttgactgaatcctgcatctgaaatcttggcacctgttcttgagcaaatcttttctatgggtgctggtcagacatagaactgggatatatgaacttactgcataggatatataaattgtgtgtgtgctttttaaacagtaattattttacaactcataatgaatttgtttatagaaccagaactgtttttcccaagttggtgttctttggtgtgtccaaatctgggtcatagcatctaaccatagctctaagaactggaaggtgacttatctgaatatagacttgtctgactgtatatcctcctacataactttctctcttttttttttttttttttgagacagggtcttgctctgtctggagtacagcggcaagatcatggctcactgcagccttgacatcctgggctcaagccaacctcccaattcagcctcctgagtagcttggactacagaagcccaccaccatgtgtggctattttaaaaaattttttgtagcaataggctgtcactatgttacccacaatggtcttgaactcctgggttcaagccaccctcctggcttggcctcccaaagtgctgggattgtagatgtaagccactgtgttctctctttttgagtgccagaattcctgagttcattatcactggatattctccctgccctgtgccaccaccactgtacaggatctgtaacaatggttgtttgcttacttgctaataaatatatctagttaataaccgtatgtaaggcagtgtgcggtgactcacgcctgtaatcccagcactttgggaggccaaggcagatggatcacttgaacccaggagttcaagactggccttggcaacatggtgaaaccccatctctacaaaaaatataaaaattagccaggacgtggctgagtcgagaatcactcgggcctgggaggtcaaggctgcagtgagctgtgactgtgccactgtactccagcctgggtgacagagcaagacatggtctcaaaacaaacaaacaaaaggtcaggtgcagtggctgacgcctgtaatcccagcactttgggaggccaaggcgggtggaatacctgagatcaggagttcaagaccagcctggccaacatagcaaaaccccatctctactaaaaatacaaaaattagctgggcctggtggcaggtgcctgtaatcccagctactcgggaggctgaggcaggagaatcacttgaacctgggaggcggaggttgcagtgagccgagatcgcaccattgcactccagcctgggcaacaagagtgagactgtatctcaaaaaaaaaaaaaaaaaaaagaaagaaagaaagaaattgtgtagcagaatttgatctgaaacctatatatacaggaagtggcaaactctcagtcacccaagtttctttggcagatacttatcaaaaagaaaacaaaacagaaaacgacatcgtctattatcttttgcttacttctactctctggaacttcactgctcttgtagctcagatacttgctagcagttagtttctcatagaaaaaacacaaaacaggcaagtgatccacagctttctagctaacctctgatgtctggttttgtaggaacagaaaaaccaccctggataggtaagcaacatgtataacaaatatagaaaatggctttttttgttgttgttttttttttttgagatggagtctcactctgtcgcccagggtagagtgcagtggcgcgatctccgctcactgcaagctccacctcctgggctcatgcccttctcctacctcagcctctggagcagctgggactacaggcgcccgccaccacgcccggagaattttttgtatttttagtggagacgaggtttcaccgtgttagccaggatggtctggatctcctgacctcatgatccacctgcctcggcctcccaaagtgctgggattacaggcgtgagccaccgcacccgggcttgtttgtttttttgagatagagtctagctctgtcgcccagactggagtgcagtggcaggatcttggctcactgcaacctctgccgcccaagttcaagtgattctcctgcctcagcctcctgagtagctgggattacaggtgtctgccactgcacctggtaatttttgtagttttagtagagacgggtttcaccatcttggccaggctggtcttgaactcctgattttgtgatccacccgcctcggcctcccaaagtactggattacaggcgtgagccaccgtgcccagcggtttttttttttttttttttttcttgagatggagtctcacgctgtcacccaggctggagtgcagtggtgtgatcttggctcactgcaacctctgcctcctgggttcaagcaattcttgtgcctcagcctcctaagtagctgggattacaggtgctcaccaccatgcccagctaatttttgtatttttagtagagacaaggtttcgccatgttggccaggctggtctcgaactcctgacctcagatgatccacccaccttggcctcccaaagtgctgggattacaggtgtgagccaccacacccggctagggttactgtcttatatactcctcgttgccttgaaaaggctccagaataatacacttatgtaaaaagaattgagtttggcctattatcctcaaacggagtcagattctaggacattattaaaagatctttttggtgaatgaaatcttaaaagtttatatcccagtggacaccataatgattatggatatttttataatttaaaaatttgctttaattcatcagattttctcttaagaatttatcctaaggatgtggcctaaagattaagctacaaatgatgctcatcacagagctgtgcataattagaagcaacctggccaggcatggtggcttacacctgtcatcccagcactttgggaggccatggtagggagactgcttgagcccaggagttggagaccagcctgggcaacatggcaaaatcccacctctacaaaaaattagttgggtgtggcacaagactgagatgaaaggagcaccggaggtcagggctgcagtgagccatgattgtgccactgcatgcctgcctgggtaacagagtaagatcctgtctcagaaaagaaaagaaaagaaaaaataaaagagaaaggagggcaggggagggggagaggagggggatggggatgggaagaagagaggaaaggagaggagaggagaggggagaggagagaagacgagacgagacgagacaagacgagacaagaaaaggagaaatgacctaaatgtctcacactgtggcattaaagaaatcacagtacctaggcttagcacagtggctcatgcctgtaatcctagtactttgggaggccaaggtgggcggatcacttgagctcacgatttcgagaccagcctgagcaaacatggcaaaatcccgtctctacaaaaaatataaaaattcgccagggtgatggtgcatgcctgcagttccagctactcgggaggctgaggtggaaggattgattgagcctgggatgtccatgctgcagtgagtcatgatcataccactgcacttcagtgtaggtgacagaacaaaaccctatctcaaaaaaaaaaaatcatagtatatacacatgtatatattacatacacctgaaatacatggaaagatgagacaagggaaaggaggtaggcagaagaggtgtatgaatactaaccatttgatttttctttctttgaaaaaaaaagattactagtgcctgaagtcttagcatgatggtggcaagagggtgcagtcttgcctgtggtagcagaattacctataagtaatacttatatgaacaggacattttcttgtgtgtgtgtgtgtgtgtgtgtgtgtgtgtgacagagtctcactttgccgccaggctggagtgcagtggcgtgatctcagctcactgcaacctccgcctcctggtttcaagcgattctcctgcctcaggctcctgagtagctgggactacaggcgtataccaccacacctagctaatttttgtattttttttttaagtagagatggggtttcaccatgttggccaggatggccttgatctcttgaactcgtgatccacccgccttggcctcccaaagtgctggaattacaggtgtgagccaccatgcccagccgggacattttcttaacagactcctcgggaagattactgtcagctaccttgttttccctgtcattcagattttagaattttattaagtctcttttacgtgtttcattaacatgtataagtagactagaaaacttcttccaaaacacaattaacaggggacaaattaatggtttcaataaactataccagcacattctaatctcaaacttatttgttttcaaaacatatgcattgtccacctcacctccttatgattcacatttccatgttgtctgacacccactgtattatgtacagtgtgatccaatgtgttttacatataatatgttaaattggataacttaccacaatctatcatttcaaagtcatcatttatatttttattatatgccacaacttctcttggaatacttttcagcagaacacttctatatacctacatgccagaggggaagaaaaggacagctcagtcacagaggtacaggttaaacaaaatcaaagtgagaagagcaaaatatcaaaccaattaaaaactatttgtctgtataagtgatactcaagggtaaaatgttattagctctagtaagtatagattataacacataccataaaagaggggatactggagaagagcctaccatctaagatgggcttagtttataaaacagaagaaatagcaactaaagactgatgatcaggttttactaaatgaaagcaactttaaagacctgaatttggtcaggtgcagtggctcacacctgtaatcccagcactttgggaggctgaggtgggtggatcacttgaggccaggcgttcaagaccagctggccaacatggtgaaagcccatctctactaaaaatacaaaaattatctgggtgtggtagcgcacagttgtaattccagctactagggaggctgaggcagaactgcttgaactcagtgggtggaggttgcattgagctgagatcgcaccactgcactccagcctggacaacagagcaagactctgctcaaatacaaaacaaaataaaacaaacaaacaaaaaacaaaagacctgaattaattcctccttcttcttaattccttacacaacaatcaattggtcttttttttctttttttttttagagacagggtctcactctatggctcagactggagtgcagtggcacaatcatggctcactgtagccttgacctcctgggctcaggcaatctgtctgccttggcctccttaactggtgggattacaggcgtgagccactgcgcctggaccagagtcatttgttcttaatgcagcttgtttttctgcccccagcccattcccatctcctttcagatggccacatgaaaatcttttcccttccctgcccctaaactatttctcacctctgagatagctggaaaggcatgatccattcccccttgtactgtattataggttactggtattaagaagatattcagggaaccatggcttggcccattcttgactcacactaacctcaccttaatgatcttcaaggacaatctagagctttctaggctctgttcctgagggattttcctgaagaagcccagaaactcttagcttatcacaggatataacaaatacctgtacttggttcttcaaatgtctctatattgcttgctataatgtattttagggcttaaacaaagctctcttagaaggggatataactactaatactgaggccacatctctattttggtctgcagtctaggccactacctctctctttctgtctacaatttccagggccagagaagaggccattatgcttcctaagagcagagcaactaggttcttgaatgatcaaacccttaaggtaatttacttgtgttcttcaggtacaataataacaacaatatgacatgaacattcattaaatgcttattgtgtgccagtccactctgctaccatgactgaaaggtttcatggaattttcaccacggtcagaacaatataatcagaaatgtttaacatctattcaaagatgcaaacattaggatgcttagcagatggcaaaagaagctgtagttaggttaatgaatcctcaaatttcactgggtttaaatatcattaaaaaataaagtcatataattaaagaatattattattattatacataacttttttttttttttttttgagacagagtctcgctctgtcggccaggctggagtgcagtggaatgctcttggctcaccgcaacctctgcctcctgggctcaatcaattctcctgcctcagcctcccgagtagcagggattataggcgtgtgacaccacgcctggctaatttttgtatttttagtagagacagggttttaccatattggccaggctggtctcgaactcctgacctcaggtaatccacctgcctccacctcccaaagtgctgggattacaggcgtgagacaccgcacccagccattatacatatctttcattaaatgaacaaatggaatggcagaacttatgagaagtatatgaaagtatatggatgagtcggaaacagtcagacttcctggcttctattgaaactgtccttcaatgaaattatctcttgagtttaatgttatccattaaaacagaaaatctgaagtatattaaaactataaaataagtttaccttttatataacttgtcagtggaaaagagtaaatctatttttggacagtaggaaaaataatgtaactcacgtgactattagcttggggctgattcctataacttttcataatttcttgaaaagttctttcttcttttgttacctaaggaaaataaaaaccgcatttatcaactgctttttgaaagaaaaatggctctgaacaaaacttcaattataagttggcactgagagcaaccttgcagaaaaccattaaccccaggccagtccatgactaaaaaccactaacatttatgattttttctacctttaaagttcaggctttgtggcctgtggggactcacttaatagtttcattaatcaaaaagcagtgaaactgctatggtgtgactctactgaaaatccatttctttatataaaaaaagatataagaaaactcagatctgtttaattccctgcagtctccagttttattaatttttaagtacttacttaaaagtaaattaaccacatacgaaggattaaaaatatcttacagtgatgattctcaatcaaactgagtggctattacaggattaggttttaacatttcaggacagactgtagggtttctaatgcttagacagaagtcacagtggtggccaaaaggaagaaaatggattagtgatccaaaaaggaattccttctgggatctctgtgatcataaacttcacttaagtcactcttttcccctgcttcactgtccattagtgctaaacctgttctctataatgatgagctagaaatggcaaagcctgaactctaacagtcttctggaaaacacacgattagttagtaacatttatcttttaattttttaattcttttttttttttttgagatagagtctcagtctgtcatccaggctggagtgcagtggcatgatcttggctcactgcaacctctgcctcccggtttcaagtgattctcctgcctcagcctcccgagtagctaggactacaggcgcgtgccaccatgcccagctaatttttgtatttttagtagagacagcgtttcactgtgttagccaggatggtcttgatctcctgacctcgtgatctgcctgccttggcctcccaaagtgctgggattacaggcatgagcctgcgcccggcccttcaggttgagttttctaactgcaacttcatcattctgcaaatcagcaagatacacttcaaacacatgactcttgaagctatcagatgcaatttggttccttgagtcctggtaactagtgtctttccagtatttcttgtattgaacatagtcggtgcttttttacatcaaaccaatctttcttaaaaaatgaatcaaccattttcttctttgctccctttttgttgccttttgtatggtgcattttctcgtcaaccaccatagtgctgcagtaacaattattaagacctattttttacagagatttcaaagaggcattgtgggaggaggggtcacaaaggagtttaaaaacatatgctctgtctcaaaaagctgaaaaatcaagtcttaactgtatacatctgctaggactgccagtgtggccagtacagtcaagacaaatgattgtatcagatatatgagaattttaaaaaacaagcaagatatgttattccatgacttaaaacacgttgtagcaactagaaagtaaaatgctcttctgaggcagcacaataaatcacgagaaagcaatatgcgatatggtacagaaacttttatttttcttgagacagggtcttgctctattgcccaggctgaggtacagtgtcatgatctcggctcactgcagccttggcctcctgggctcaagagatcctcccacctcagtctcccaagtagctgggcctataggtgcaagccacaatgcccagctgatttttatattttttatagagatgaggtttcaccatgttgcccaagctggtctcgaaatcctgggctcaagctatctgctcaccttgacctccgaaagtgctaggattatacgtgtgagccaccatgcccagcctcttctcccaatttatacattacctttgccatgatataaaaggcacaaaggaggagctgatccaaatgcctgtctttcattagatcaggacagtgaactaaagtgaattcaaaacacgtccatatcttccttcgtaactcatttgaaacatccagttttagacatagatcacgtaagcgtacacttgccaaatgatagacctaaaatagaaggtaacacattgatgcaaaacaccaagtaaatcatttctcaaatttttatgtcttaccaagaccaagattaaaaaacataggctgttgatatactaaattaaataaaatttctgttctatagcactagttcactgctatggcaggaggatatagattaaagcaaaactacttgaaaaaattttttaaagatgtcatctattactctatgctgccaactatgtaaagtaagaaaaaatgaaatataggatttacctgcatcatgacaattatgaacatataatttttccttttttttttttcttaggtggattctcgctctgtcacccaggctggagtgcagtggcacaatcttggctcactgcaacctctgccttctgcattcaagcaattctcctgcctcagcctcccgagtaactgggcttacaggtgcatgccaccacgcctagctaaatttttgtatttttagtagagacagggcttcatcatgttggccaggctggtctttaactcttgacctcaagtaatccatgcactgcagcctcccaaagtactgggattacaggtgtgagccactgtgcccggctcgaatgcataatttttcaaagctcagaagtctctgtctattctctttgggttcaggtaaaattgctagggggtctaacatgccaaataataaatgaaatatttgactccaaaaatgagtcagaaagcaaaaccatttaaaaaattgctcctatattctacactttttaggagcacaatgggaacgaaacaggaatgttaaaataagtaagatacaaagttgttgttttttttaaagcctgtgaaaataaattcagttcaattccctggccctagatcctgcaagattgtttttttattttaagacttgataaccgtgatgtggtattcctaaaccagactattctattcaaactatttttttttttttttttttgagacggagtctcactctgtagcctaagttggagtgcagtggcatgatcttggctcactgcaacctccacctccgggctcaagtgatgcttgtgtctcagcctcccgagtagctgggactacaggcaagtgccaccacgcctggctaatttttttttttttgtatttgagtagagatggggtttcaccatgttgcctagggtggtctcgaactcctgagctcaggtgatctgctggcctcggcctcccaaagtgctgggattacaggcatgagtcactgcgcctggcccaaactatgtctttaaatttccagatggaaaaaaaaagttaccccttacagaaaattatctttggcagaaaaatacctacaaaccgagcttaaaaactaatttaagctactcagtgatctaatataaagagagacaaacagttgactccaaagccaccagtgatttattttacagcaaacaaattttctgcatcctctccccttgtttctggtccagccatgctcagtaaatagtagggtaagagcagagagaaagatgctagaactttatattcatgaaaggagaagataagatatatagtcctagctagaataattaaaaataatatgtagttaagtaatacttggtaaagtatcttttacagagctgatccaatgcttacaggatacacatacgctggaaggcttttgattctaacattcacagtaaattctatttaggcatagaacaccagcatcacactgagttcagcatagataatcgttataatttactcaatgaatggttattttgaatttattatagattcagacatttcagttccttttatattttctagcttctaatctatgagcaggttataattaaatgaaaggaaaaggatgttagattctaaaacaacattcaaaataaagaattcaccaaaaagtcttatttctgtcaaacttaggttaattatcagaggcaataatttgccattttgaaaattaaaaatggtaagtaaatggggaaactgctatattttcaagctctgttgttaaaacagtccttaggcataggagggggtgaagggacagaggagagaagccagtaaaggtggtgaaaagagcaagactctccctcaaccatcccaactgccaaccaaagcagctctgctttcatatattttgtttatacttctgaagactatttcattcaaagaagggatttccctaaaagatgaaattccttggagaatcagttgctccaaaacccacaatgtaatgaaaataaatgagctataattgaaaggaacagaagacaaagaatggttgtagaagctataaatgagttgttttccagtgtctgtctcctcttctgcaataacagaacccttaacatttacacccaccttcctgtaataaagactatatttgcccctttgaaaattctgcctgggcacggtggctcacatctgtaatcccagcacattgggagggtgaggtggacggactggttgagtccaggagtttgaaaccatcctaagcaacatagcgaaaccccttctctacaaaaaattaaaaaataagctgggtgtggtagcctgtgcctatagtcccagctactcaggaggctgaggtgagaggatcgcttgagcccgggaggttgaggctgcagtgagccatgatcttgccactgcacccctgcacgggtgacagagcaagaccttgtctccaaaaagaaaaaaaaaaacattctacaagtggctatatgactaagtgggaaataaacagcattggtgtatgtaacttctaggacaggttctgaaggtgaggaggcatgctctttttctttctgctggctagaatgcagatatgatatctggaagggaagcagtcatcatggactgagttagaaaccttgtgttgaaaatggccaaaaaaaccttgaagggacctgggttttttttttttttgagatggagtcttgctctgtcacccaggctggagtgcggtggcgtgatctcggctcactgcaacctccgcctcccaggttcacgccattctcctgcttcagcctcccgagtagctaggactacaggtgcctgctaccatgcctgggtaatttttttgtattttaagtagagatggggtttcaccatgttagccaggatggtctcgaactcctgacctcatgatccgcccgtcttggcctcccaaagtgctaggattataggcgtgagccaccgacctggccaggacctgggttcttaatggtcgtggtaaccacagcagtcccatactatttacacagactttatgtgaaagataaattctcttgtttaagctactattattttcaaacagctaaactgaaatctaagaaataaatagataatcactatgcccgaggtcagaaaacacattagaggtactgtgaaagaaataggatttgatataaaaatgtaaaaaataatcctcatgttttatcttaatgtaaaattatctaattcagagtgtgggctgagaccttccatgacatcaagtgacaaaagaatggagaaaaacatgattgaggaagagtataaattaaagaagatttatttagcatagagaaaaaaggacatataaaaaattattgccgggcgcagtggctcatgcctgtaatcccagcactttgagaggccaagacgggtggatcacgaggtcagaagttcaagatcagcctggccaagatgatgaaatcccatctctactaaaaatacaaaaattagccgggtgtggtggcacacacatgtaatcccagctactcaggaggctgaggcaggagaattgcttgaacccgggcggcagaggttgcagtgagccaagatcgtgccactgcactccagcctgggtgacagagcaagactccatctcaaaaaaaaaaaaaattattaggctgggcgcagtggctcacacctgtaatactagtactttgggaggctgaggtggtggatcactaggtcaggagatcgagactgttctggccaacgtggtgaaaccctgtctctactaaaaataaaaaaattagctgggcatggtggtgcgtccctgtaatcccagctactcgggaggctgaggcagagaattgcttgaactagggagtcagaggttgcagtgagctgagattgcaccactgcactccagcctggtgacagagtgagactccatcttaaaaaaaaacaacaaaaaaaaacaacaaaaaaaaaccaaaaaattattacaagaacaattagttgggcatggtggctcacacctgttgtaatcccagcactttgggaggctgaggtgggaggatcgcttgagcccaggagttcaagatgaacctgggaaacacagcgagactccatttctaccaaaaaaaaaaaaaatttagctgggtggggtggtgcatgcctgtggtcctactactcaggaggcaggaggatctcttgagcttgggaggtagactgcagtgagacatgatcgtgcctatgcactctagtctgggcgacagagcaagaccctgtctcaaaataataataaaaaaagaatgattagtagagaaatacacttaaatttgcctgtagacccaggtactcggagggtaatgaaagaggatcacttgagcctaggagtttgggctctagcgtgctataactgtgcctgtgaatagtcactgtactccaacctgggcaatagaatgggctagccaaccatctagctgtgggatgcactgcagtcatgtttggttataaatatctgattaacatgtctatcttatcagaagctgatgattcaaaatgtgctcgtaagagataggacaaattcaagttatgtctaaggtcaaccgtttttagtccctttccattaatattaaaataatttaggcattataataagaactggtcatatgctaatttaaagggtaacacattagatttattttatttatttttgagttttggagacgggatcttactctgttgcttgggctggagtgtagtagcaccttcttagctcactgcagcctcgaaatcatgggctcatgttatcctcccacttcagcctcctgagtagctgggactacaggcatgggccactatgctggctaattttttaattttttggtagagactgggtctcgctatgttgcccaggctggtcttgaactgcaagcctcaagtaaccctcctggcttggcctctgaaaatactgagattacaggcataagccaccatgcctggcctagatttataataaaaattatgagtaacagctgggcatggtggcgcatgcctgtaatcccagcactttgggaggctgtggtgggcagatcacctgaggtcaggagtttgagaccaggctggccaatatggtgaaaccacgtctctactaaaaatacaaaaattagccaggtgtggtggtggacacctatagtcccagctacttgggagggtgaggcaggtgaatcgcttgaacctgggagacagaagctgtagtgagccgagatcacgctactgcattccagcttggtagacagagtaagactgtctcaaaaataaataaataaataatggcttgggtggtgactcacacagtaatcccagtgctttgggaggtcaaagagggaggatcacttgaacccaggagttcaaggctacagtgtgccatgatcatgccactgcactgtagcttgggtaacagagcaagaccttgtctctaaaaataataataataaaaaatatatagccttctcacagtatcccagcaatctttagaatgattcttcgctaattaaaattcacccatgagatccaacatgtatttgtcccacagtgaactccattctacggcaacataacacaaaagagtttcagtaaattccagaggctggccaactacttactcaaagttagaaaagaatacaagctggcaaaaaacataagttagatctgaaaacagaatcaaaccctgtgagcctgagtctaaacttatagctcaccaggatcataatgttctcttgaaaggtcaaatgtattttttaagtggctaaaggtacattacttgatagcaaagccagacaaagaaagcataagaaaaaatacagaccactatctcttacgaatattggcgcaaaaatcctcaactaaatactagtaaaacaaattcaacagcatatgaagagggttatacaccatgaccaagtagaacttatttttagaaggtaaggataatttaaaacaaggaaatcattcagtataacacaccatattaaaaggacaaagggaaaatggccacataatcatttcaagtgatacaggaaagcatttgacaaaatttaacaccctttcatgataaaaatactcaaaaagctaggaagagaaggaaactacctaaacataataaaggatatacagtaatcccttggtatacacaggagatttcttccaggagcccctgcatatacctgaatgtatgcatactcaagtcctgcatttggccctgtagaatccccatgtacaaaaagatggccctctatatacacaggtttcacatccctcaaatactgtattttcattctgtgttggctgaaaaaaatctgtatataagtggacttgtacagtgcaaaaacatgttgttcaagggtcaactgtatataaaaaacccacagttaacatcatactcaaattgaaaacctgaaaggtgttcctctaagatcaggagtaagacaaggatgtttgctttcaccacttttattcaacatagaacgggaattcctagctagagcaataaggcaggaaaaagaaatccaaattgcaaagaaagaagtaaaattatctttgttcacagatgacataatcttgtgtatggaaaactcaaaaaacctaaagaatccataaaaactgatagaattaataaacaaatcagcaaagctgcaagaaaatcaatacaacaacatctcttgtgttcctttacattaatgaacaatctaaaaaatgaaattaagacaattctacttacttattacttacaatagcatcaaaaagaatacttaggaataatcttaagcaaggacttgtcttgcaaaagacatatacagaaaactacaaaatgttgctgaaagaaattaaagaagacgcaaatgaaaagacatcctatgatcatggactggaagacttgacattcttaagatgtcaacactagccaatgcgatctccatattcaatgcaatctctgtcaaaattccacaatgtttttgcagaaagagaaaaatccatcctaaaactcatacagactctcaagaaatcttaaatagctaaaacaatcttaagaaagaaaaacaaagttggaggtctcacacctcctgattttaaaacttatgacacaaagctatggttatcaaaacagtgtggtactgaatacagatagacatatagtccaatgaatagaatagagagcccagaattaaacccccatatctatgctcaagtgacttttcaacaaggattctaagctcattcaatgggaaagggcagtctttcaacaaatcgtgctgggaaaaatggatatccatgtgcaaaagaatgactttagacccttatctaacaccatatacaaaaattaaaatgggctgggcgtggtggctcacggctgtaatcccagcactttgggaggctgaggtgggcagatcacttaagctcacgagttgagaccagcctgggcaacatggtgaaaccccgtctctacaaaaaagttcaaaaacaggcccggcgtggtggctcacacctgtaatcccagcactttgggaggccaaggtgggtggatcacctgaggtcagtagtttgaaaccagccaaaccagcacggtgaaacctcgtctctactaaaaatacaaaaattagccaggcgtggtggcatattcctgtagtcccagctactcaggaggctgagaaaggagaattgcttgaacccgggaggcaggggttgcagtgagccgagattgcgctactgcactccagcctgggcaacagagtgagactctgtctcaaaaaaaaaaaaaacaaaaacaaaaaacccaaaaaacgaaaattagctgggcatggtggcacatgcctgtagtcctagctgctcagagggtcgaggtgggaggatcatctgaacctgggaggcggaggctgcagtgagctgtgactgcgtgactgcactccagcctgggtgataaagtgagactctgtctcaaaaaaaaatagacataataaatataagagctaaaaactataaaactcttagacgaaaacataggggaaaagttttataatactggatttggcaatgatttcttgtgtatgacaccaaaagcacagacaaaaaatgaaaagaataaattgactttattaagattaaaaactttcatgtgtcaagaacactatcaacggaatgaaaaggcaacccacagaatgggagaaaatacttgtaaatagtatattttataggagattaatatctagaatacataaagaactcctacaatttaacaaaaacaaaacccaaaactcataattaaaaaaatgggcaaaagactcgaatagacatttctataatgaagatatatagatgggcaaaagcacatgaaaagatactcaatattactaatcattagggaaatgaaaattgaaactatagtaagatgtctctttatacccattggatggccattatcaaaaaaacaaacaaaccagaaaacacgaaacgttggcaacgatgagaagaacttggaacacttgtgccttgctagtggtaatgtaaaatggtccacccactgtggaaaatggtacggtggttcctcagaaaatgaaatactaaattactctcccatttctgggaatatacccaaaggaattgaaagcagagacttgaatagatatttgttgctatttttttttcttcttaagacagggcctcgttctgttgcccaggctggagcgcagtggtgtgatctcgactcactgtagcctcaacctcctgggctcatgtgatcctcccacctcagcctccaaaatagccaagactataggcatctgccaccatacctggctgcttttttttttttttttttttaaaatagagatagggtctcactgtgtcgcccagggtggtctcaaacccctgggttcaagtgatcctcctgcctcggcctcataaagtgctgggtttacaggcatgagcaaccacgcctggtttgaacagacacctgtacacaaatgttcatagcagcataactcacaatagccaaaaggtagaagcaacccaaatgcccatcagcagatgaatgaataaacaaaatgtggtattaaaaaaaagtatattcatatgatggaatattttttcttttgttctttttttctcttcttcatacaatggaatattattcagccttgaaaaggaaggaaattctggcacaagctataatatgaatgaacctagaagacattacgctaagccagtcacaaaaacaaacaaatatcgtatgacttcactcataggaagaacctagagtagtcaaattcacagaaacagaaagtagaatagtagttgccagaagctggggaaagggagaaatggatacagaatttcagaatgggaagacgaaaaagttctggagatagacggtagtaataaagctgcacaacaatgtgaatgtatttaataccattgaactgtacacttaaaaatggttaaaatggtaaattttgtgttatgtatattagaaaaaaaaaagaccaaagtctgtctctgttactcaatctttcttccattgattaaacaaattcttctaaagtgctataaaaacacatacctttctgtaaaatagtgctaaggacccagttctctttggcctgtttattccagttgaatgtacctcttgtgctttagtcagattggtctgttttggagaagcaccaattaatgaatgagcagtaagtgatacaggactcttgactttggactcctgatttgtattcatggaaagaggtatcagtgtgatctctccagcatcatttgcgacacctgaatgtataagcattattagaaataatctgcatatgttctaggaaagttgtcaactatatatattttgacaattatatatacatatatctgtgtgtataagaaggctacaaaatagtaattctaggttatgactgaattctttttttttttttttttgagacagggtctcacttggtcactcaggctggagtgcagtggcgccatctcagctcactgtggcctcgacctcctgggctcaagtgatcctcccatttcaacccccgcaaatagctgagactacaggtgcaagccactatgcctggtaaattttttttttttttttttgagatggagtcttgctctgtcgcccaggctggagtgcagtggcgtgatctcggctcactgcaacctctgcctcccgggttcaattctcctgccttagcctcctgagtagctggaactacaggcacatgctaccacacccggctaatttttaaaatatttttagtagacacagggtttcaccatgttagccaggatggtctcgatctcctgacctcatgatctgccctcctcggcctcccaaagtgctgggattacaggagtgagctactgtgcccggcttgtattttttttttagagatgggagttttgccatgttgcccaggttagtctcgaactcgtcagctcaagccatctgcctgccttggcctcccaaaatgctaggattacaggcatgagccactgcagctggactttttttttttttttttgagacagtctcactctgtcacccaggtgggagtgcagtggcctcatcttggctcactgagacctctgcctcccaggttcaagcaattctcctgcctcagcctcctgaatagttgggactacaggcatgcgccaccacacccggctaatgttttttctctatttttagtagagacggggtttcaccacgttggccaggctggtctcaaactcctgacctcaagtgatccacctgcctcagcctcccaaagtgctgggattataggtgtgagccactgtgcctggcgccccccgggcccccttttttttttctttttctttttttttttgacaatgtcttgctctgttgtcctggctggagtacagtagcgtgatcatggctcactgtagcctcaaattcctgggctcaagtgattctcctgcctcagcctcctaagtagctgggaccataggcatacatcaccatgcccagctaatttaattttttgtagagataggatattgctatgttgcccagtctgggtctcaaactcctgggctaaagtgatcctcttgccttggtctcccaaagtgctgggattacaggtgaaagctaccatgccccgcataaatccttattttctagaaacaagaatattcggttttgtttttatactttaaatttatggaaaaaaaagcaaattttgttctctattttgtatttgcctgggatacatttatagtttaaatttattggaaaaaaaagcatttttttttttaacattttgagcacttgagctgttagtcaaaaaacagaatttttgctcaatacatacatattggaaagctcagataagaacattttaaaagtagtttgagacctgggcaacatggtaaaacctcatctgtaccacaaatagaaaaaattagctgggagtggtggcacttgcctgtggtcccagctactcaggaggctgaggtgggacgatcacttgagcctgggagcagaggttgcagtgagatgagatcatgctgctgtactccaatgtgggtgacagagtgagatcctgtctcaaaaaataaaaaaagaagaaaagaaaaagtaaaataagtctaaacaaacagagagggtagtaaatttataaaatttaaaaataaaaaaaaaaccactataggttcaaaacaaaaaggtggggcacagaggatttatagggcagtgaaactactctgtatggagctatagtgacagatacatgtcattatacgttctcaaaatcaataaactattcaccaagagtgaaccctaatgtaaactatgggcattgggtaatgtgtcagtaatgtaggttcatcaactgtaacaaatgtagcattctggtgtggaatactgataatgagggaggctttatatgcctctggttggggaagggggactatgagaaatgtctgtaccttcctctgaattttgctgtgaatctacaactgctctaaaaaattcaaatctatttaaaaaaaaaaagtataggttcaagaaaaaataatgagttagaaaaaccatgtgatctaatccactaagacatttcttaaatttttatctcagaaaaagtacaaaacaaatgcactataacgttaccatgtaatggaattgtaactttatgtcctgttgttcctgttactggggctgtggccattgttagaagagtttgaccaggtaaaattgatacattttcagcagtaatgcttgaagaaggagcgattttcaattttgttccttctgttatgatcttgtccataagcatttcctttggggggtcctctccaaagagtcttctcttagcactccctgcggtaggagaactgtagcgttcatggacagaaattggagacaatggttgcatatctaaaaaaaaataataaatttaaaacagaaatgtattccaaaataataaattaggtttactcattcactcaacagatagtgagttacttatgctgggcactagctagatatgaataacatggcctttgccctcatggaatatgtagtctactgggagaaagaggcatgaaataagtcactacgataaaacgtgaaaattatgatcactcatcttcctggtttcttgaacctctgcctacattaaaggagcaaaacattaaggacaaagtagaggttgagaggtagaatgaagtgagcactaaattttagtagtagtccaatatctcccaatcttacctagtagagagcacctgagaagaagggaagcaaaagcaaaaatcaggaatttgggtcacagttttgcctctttgtgaatatttgcactccaagcagtttaaggcggtagctctggctttctaatttagtagatatggaatcatctttagtaaatctatcagaagatatgagtaaagatgatataaatctgcttaccttgccttaatctgagggttggcagtactgtgttgatcaaaaataaagtaaggattatggattttgcctctcttcctgtgctatcctttcacaggatctgctttccattccctctctaccagctgcacgggtttttctagccccttacaaccctacatcttttctacatcttttttcacaattcttccctcaaccaattattccttacaggtaggtcaataatatgcttttaaaacaaaagtatttatttatttatgagatggagtcttgctctgtcacccaggctggagtgcagtggcacgattttggcctactgtgacctctgcctcttgggttcaagcgattctcctgcctcagcctcccaagtagctgggactacaggcatgtgccaccatgcctggctaatttttctatttttagtagagacagggttttgccatgttggccaggctggtcttgaactcctgacctcaggtgatccacctgcctcatttgggattacaagcttcagccaccgtgcccggccttcattatttatttttacattcactagataattagatagtcatgtaatctattttcttttctttttttttttttttttgagatggagtctcgctctgttgcccaggctggagtgcagtggtatgatctcagctcactgcaagctccgcctcccaggttcacgccattctcctgcctcagcctcctgagtagctggaactacaggcaaccgccaccatgcccggctaattttttgtatttttagtagagatggggtttcaccgtgttagccaggatggtctcgatctcctgacctcgtgatctgcccgcctcggcctcccaaagtgctgggattacaggcgtgagccactgcgcctggccctgtaatctattttcaaaacatgttcaaaaggtatgaaaatgacccctggcaatgatttagaagctctctgtattagtgaggtgattgggaaaatagttatagtttaataaaaatctccgtaattcttgggcttatgaaagcagcttttacttctcctgtcttcagtaaacaagtgcaaatttctatagttgtttccattactcttttacaagagtccatgtgaatgccttatatctaagaaatccacgcaagcccttgaatctgactaggcatgtttaaaggtgacatttcaaggcaagactcgagttgaagccataaagttagctgcaaatccattgaaatgatcttttcttagcacagtactggaacagctatggtggatgctcaataagaatgtaatgaatatacaaatgtaaagcggatccaaatttagaaacatgacaatctgtcaaggtacagaaaagatgctcacttagttataaattatatgagaggaaggtggcaagcacagtttaaactattcttgctaagtttttaaaaaagaaaataattctcaatatttcgtaagttttaaattatagtatactaaatatttttactattttttcatttctctaaacattaataactgacagaaagaagagccttttttttaacattttgacaagattcgtaaagatcaaaaaacaattataataattataattattcccactgattaaaatgactgagtattcacatcttatgcaatcttgttttttttttttggagacggagtctcactctgtcgaccaggctggagtgcagtggcacaatctcggctcactgcaacctccgcctcctgggttcaagcaattctcttgcctcactcttgcctcagcctcccaagtagctgggactataggcgcatgctgccatgcttgcctaattttttgtattttactagggaccagttttcactgtgttgcccgggctggtcttgaactcctgacctcgtgatctgcccgcctcggcctcccaaagtgctaggattacgggtgtaagccactgcgcccggccattgttttttttttttttttttttttgagatgcagtcttgctctgtccccaggctggagtacagtggtgcgatctccgctcactgcaaactccatcccttgggttcaagcaattctactgccttagctgcctgagcagctgggattacaggtgtacaccaccatgcctggctaatttttgtatttttagtagagacagggtttcaccatgttggccaggctggtctcaaactcttgacctcagatgatccacctgcctcggcctcccaaactgctgggattacaggcgtgagccactgtgcctgaccttatgcaatcttttttttttttttttttgggtcggagactcgctctttcgcccaggctggagggcaatggcacgatctttgctcactgcaacctctgcctcccaggttcaagtgattccctgcctcagcctcccgagtagctgggattacaggcacctgccaccatgcctggctaatttttgtatttttagtagagatagggtttctccatcttggccaggctggtcttgaactcctgacctcatgattgacctgcctcagcctcccaaagtgctgggattacaggaatgagccactgtgcctggccttttttttttttttttttttctgaaacagagtctcgctctgtccgccaggctggggtccagtggtgtgatcttggctcactgcaacctctgcctcccgggttcaagtgattctcctgcctcaacctcctgagtagctgggattacaggcacccgccaccacacccagctaatttttgtgtttttggtagagatggggtttcaccatgttggccaggctggtctcaaactcctgacctcaggtgatccgcctgccttggcctcccaaagtgctgggattacaggtgtgagccaccgcacctggcctgcagtcatttttatgatcctgcattgcatgtaaagcaaagattgcagacagacaaacacacatacacaatcacacagagtccaaaaatggatgtaccgtactatgtaacctgaatacttgttcatctaagatttgttaagggatactatgtggtcaggagattttaactgatttttaaaaatccaagcgctatataatccacaagatacacacatcagctcgctacatcacaagagaaaataaggaagaatgaactaaaatctttccattggtaagtctcaaaatgaactattttaagaataaaaataactagtttattagatgaacttaagcattccaaagagaatacaaattttattttgctttaaatgtttttctacagagacatacacaggcaaaggaagaatataaatttgggaaatttggaaaagtaggtatttagcttagtgatatggtttggctgtgtccccacccaaatctcatcttgactgtagttcccataattcccacgtgtcatgggagggaccaggtgggaggtcactgaatcatgggggtgggtctttcccatgctgttctcctgatagtgaataagtctcatgagatctgatggttttatcaagaggagttcccctgcacaagctctcttgcctgctgccatgtaagatgtgcctttgctcttccctttgccttccaccatgatcgtgaggcctccccagccatgtggaactgtgagtaaatcaaacctctttcctttataaattacccaattttgggtatgtctttattagcagtgtgagaacaggctaatacacttatcttgttttttcctttcttctttttctttttttctgggacatgaggggggtctcactatttcgcccaggctgggttcaaacacaatcctcaatactcctgcctcagccttctgagtagctaggactacagaaagatgccatcgtgcctgactttagcttatttaaacagttctccattagcattcaggaaagattacatatatttattaaataaattacatttaaaattctattaatatagaatacactatagtatataatatagtgtacaatgagctacacaggggtgctggcacaagcatcaagctccttttcgaaccctgctgaataaattagatttcttaataacatactcacaagacttaaaattttccctgaaaaaaagccaaatgccctttgttactttttcattcctttaccaatgttgaacctacctcttcgaagactcccactgtcagttcgaacttccttgactcttgggtgcattagaggagacattggcatcaggggaagatgtccctgcacatttcctccatttcctgtttcaaagttatttgggaatataacctgtagaaaacaaaaaccctttgatttacatatagataaacttgctgattaaaacttattaaaaatgttttcttttctttttttgagataaagtctcattctgttgcccaggctggaatgcagtggcacgatttcagctcacagcaacctccaacgcccggggttcaagtaattctccttcctcagcctcctgagtagctgggactacaggtgtgtgccatcatgcccggctaatttttgtatttttaggagagacgaggtttcaccatgttggccaggctgatctcgaattcctgacctcagatgattcacccacctcagcctcccaaagtgctaggattacaggtgtgagccactgtgcctggccgaaaaagtgttttcttaacttttttttactattttatttctttctcacttcttcacaaaatacaacttggataaagtgctcaattcttaatgttaacgaacgtatggaaagagttcatttcatttaaccttataatttatataggtaagttaccaaccacaagaactaaacctctgaggtaggcagtatcattctccatttagggatgagaaaattgaggatctgaatgtgaaatttgcccaaggtcacacaactagtaagttataagagcaacggcttcaatactaatccttcttcaagttcacagcttttttgaacttgaaggagtctgaagttcttcaatggaaataaactgatgaatactgaagagtggcccaataagttactgtctgctgcaaaagaccaaagaagtatggaagagagatttcaagaaaccatcttctttccaattcctcctggccttggacagttctagtagtttgggattagggaaaaattcaagaagattaatgaagtacataaggagacaaaacaaagaatcaaaagacacgagttacaaaagaataacagaagtagacaaaaaaaaccccacaatttctcacgatactactattaaaaatgtaatttgtgcacaactctgggcacacatttttaatttttatttatttattcatttaatttttttttgagacacagtctcgctctgttgtccaggctggagtgcaatggcacgatctcagctcactgcaacctccgcctcctgggttcaagcaattctcctgcctcagcctcccaagtagctgggattatgggtgtgtgccaccatgcccagctaattttttgtatttttagtagagacggggtttcaccatattggccagcctggtctcgaacgcttgacctcaggcaatccacttgccttggcctcccaaagtgctgggattatagtcatgagccactgcaccagcctctgttttttattttttaattctgaataccaccaatgaaaagtgttcaatctttatacagacatttgaaaatttttaagtaagtttaatggtttcctagacatgatatcaaaaagcagaagcaaaagaaaaaatatctgaattggacaccatcaaaattaaaaatttttgcatttcaaagacaccatcaagaaagtgaaaagacaggccaggtgcagtggctcatgcctgtaatcccagcactttggaagaccatcctggctaacacggtgaaaccctgcctctaccacaaatataaagaaattagctgggcgtggtggtgggtgcttgtagtcccagctactcaggaggctgaggctggagaatggcgtgaacccgggaggtggagcttgcagtgagccgagatcacgccaccgcactccagcctgggcaacagagcaagactttgtctcaaaaaaaaaaaaaaaaaaagaaagtgaaaagacaacctagaaaatgggagaaacattttgcaaatcatttatctgataagggatttgtatctagaatagatgaagaactcctataattcaataataaaaagacaacccaattacaaaatgggcaaaagatctgaatagacatttctccaaagaagatatgcaaacagcttacaagcacataaaaagatgttgatcatcattagccaccagggaaatgcaaataaaaccacaatgagatattacttcactcctactagaatggcaggattaaaaaggcagataataacaagcattagcaaggatatgaagaaactggaatctttctacattgaccgtaggaacaataaaatggtgcagccattttagaaagcagtctgacagtttcccaaaagcttaaacagagttaccatatgaacctgcaattccactccaagaaaaatgaaaacatatgtacatatgttcacacaaaaacttgtgcctgaatgttcatagcagcatcaatcataatagccaaaaggggttagttgtggtggctcatgcctgtaatcccagcactttgggaaactgaggtgggaggatcgcttgagcccaggaattcaagactagcctgggcaacatagggagatcccatctctacaaaaactacaaaaattagccaggtgtggtgtgtgtgcctgtagtcccagctactcagaaggctgtggggagatcatttgtgcctgggaggttgaggctgcagtgagccgtgatggcgccactgcactccagcctgggtgacagagtgagatcttgtccccccccctccaaaaaaaaaaaaaaaaaagtcaaaaggtggaaacaactcaaatatttatcaaccgatgaatggataaataaaatgtagcatccatacaatggaatattacttagcaacaaaaggaaatgagccagatgtggtggctcacacttgcaattctagcactttgggaggctgagatgggaggactgcttgagctcaggagtttgagatcagcctgtgcaacatggcaagatcctgtctctacacacacatgcgcgcgtgcacacacacacacacacacacacaattagccgggtgtggccaggcgcggtggctcaagcctctagcctctaatcccagcactttgggaggctgaggcaggtggagcatgaggtcaggagttcaagaacagcctggacaagatggtgaaaccccgtctctactaaaaaaagtacaaaaaaaattagccgggtgtggtggtgggtgcctataatcccagctacacgggaggctgagacagagaattgcttgaactgggaggcagacgttgcagtgagccgagactgtgccactgctctccagcctgggtgacagagcaagactccatctcaaaaaaagaaaaacagaaagaaaaaaaaattagccgggtgtgggtgtggtggtatgtgcctgtggtctcagctacttgagaggcagaaggacagtttgggccgaggaagttgagggtgtagtcagtgcaccatctttgtccactgcacaccagcccgggcaagagtgaaaccccgccttaaaaaaagagaggaaatgaaataccgatacattctacaacatggatgaaccttaaaaacattatgctaagtgacagatgcccagtcaaaagggactacatttttatgattccatttatatgaaatgtctagaataggcaaatttatggagacagaaagtagattagtggttacttacagctagggagaagattcgggggtagggaagtgatagctaaaggatgtaggtttctttttgaagtgatgactatattctaaaattgtggttatggctgcacatatctatttatatactaaaaccactgaattgtacacttaaaatgggtgaactctatggtataggaattatctctcaataaagctggtttttttttttttttttttaatgatacgattatcagccttgcccagactcacttcttcacaggtaggaactttgtttgcagaaacctggagagcctcccacagtgcagaatcgtgactccatgctaaactctccaaaatctgttcttcaatgctgtttaggtgtttcaccatgtcccttgagagcccctcttctgagcggatcaccacctcaataacctgcagaggagaaagtgagaaggcaatgtggtttcaagcagttagttctagtctggacttgcatgtaggactagctgtggctttcttcttcttcttcttttttttgagacggagtttccctctgttgcccaggctggagtacagtggtgtgatcttggctcactgcaacctctgcctcccaggttcaagtgattctcctgcctcagcctcccgagtagctgggattacaggcacctgccaccacacctggctaatttttgtagtttttagtagagccgaggtttcaccatgttggctaggctggtctagaactcctgacctcaggtgatctgcccgcctaggcctcccaaagtgctgggactacagttgtgagccactgcgcccggccactgtggccttattctgtggcacagaaccaaagtcatctttgaaccataattctgtggcttactaacatcttctaatttataaaggagtttttaagttctttaaaatatgttcacatatatttctgtttttcacgttttatattataaatgacaacttgaggcaacgataggtgaaaactggtcaacagaccaacagtgggagaagtcaggtcttgggttccaagtctagttctattttgaatgtattgctcctttccagactattttttccactaactcaaaataacagaatgaatgaactatttaaagtgactttgcgtatatacactataattccattttataagggaagtatctagaataaagtttatatacacaaaatattaataatatgattgttaatagattatgatgtatgactttaatattcacatttatttacttatttatttatttatttatttatttatttatttatttattttgagacggagtctcactctgtcacccaggctggagtgcagcggcgccatctcggctcactgcaatctctgcctcccaggttcaagcgattctcctgcctcagcctcccgggtagctgggactacaggcacgtgcccccatgcctggctaattttttgtatttttagtagagatggggttttactatattagccaggatggtctcaatctcctgacctcatgatccgcccgccttggcctcccaaagtgctgggattataggcatgagccaccgtgcctggcccacatttatgtttatgattttcttcaatgagcacatatcatttatgtcatttaaaaaaacaaaggaggccgacacagtggctcatgcctgtaatcccagcactttaggaggccacagtgagaggattgcttgagaccaggagttcgagaccagcctgggcaacatagtgaaaccgagtctctattgaaaaaaaaggcatttagctgcttgaataaaataaggatgttataaataaaaaccaattactatgaggttgttgacaaaactaaactttttcctaatggcaaaagttgaatacacacattaacattaaagtgagtgtatagtagaatcacttctccctaagaaacctaaaaatactttaatcacactcagtaattcacacagataagctttccaatgacctgcattttctacaactttaattcaggcatactttaggtataaaaatttaactcttcaaaccaatttttctatcaccagtagaaaagtacctagatgactaaatattaactaaatcatgccaagaagcgtaacagtagcattagtcttaaagttcgatactatgtaacattaaacgttattgactgtgatgactaaacgttattgagggtgatgatgtagttcaatagctatgacctctgttttattttgaaaagattaacaaaaatagttctagcaagaaaaataaaggtaaggtaagtaagattcattcacactgaattagctcaaacttggggaagaagcataatctattattacggctttattagttagaccaccaccaaaatcaattttaggtcttccttcctcttggtagaaagcgttttttgttcttcatcatgcatttgtttaataggattataattttcattcataaatatggaaaatttgaagttaagtactagttccaggtcacattttcaagtccgtgttaacaaaggaactgaagctgtaagattgacttaatttactgatactctcaccttctctctctctttttttttctttgaaacagggtcttgcttaggtgcccaggctggagtgtggtggcataatcatacctcactgtaacctcaaactcctggactcaagccatcctccagcctcagttttccaaagtgctgggattataggtgtgagccactgtatgctcaactctctcttgtgttcttggtttcacccaagaggaatatatattatctttttttttttttttgagacagaattttgctcctgtcgtctaggctggagtgtaattgtatgatctccgctcactgcaaacctccacctcccaggttaaagcaattctcctgcctcagcctctcaagcagctgagattacaggtgctcgccacaatgcctggctaattttttttggtatttttagtagagacggagtttcaccattttggccaggctggtctcgaactcctgacctcagataatcctcccaccttggcctttcaaagtgctgggattacaggcgtgagccaccatgcctagccaggaatatatattttcagaacacatctggaaacactttccagatatcacaacagtgtttttcttcagcactaagataaatacaatgtttctgtgagaaacactgttttcatctcataacagaactttgttttcatctcaccttataaaagtaaaatggttgcaagttgagaacttcaataatccaaggaaaagtacgaggtgagctataggcaaagagcacaatttccaaacaacaagccatcaaggaacgatgaaatatatcttgctctaaaagaacctgggggaagagaaagaccacagtttaatatttttcagcaatttcagtctttgccattccataaagaaacctataaaaacaagaaaaaataacgtgcaaattatattacactagattactggagataaaaatttgagttctcaaattggtagttttcctataatacctattcttgctcagtgggtagggaataaatttaaataaggtgtacataacaatctgctttgaaatctgaacaaataataaaagtcagtattcccatcaacagaaaagcattagaattggttatttttcttaatgacagttaattgttttgtcaacataagggtttatttatcaaaacacagaaatgaaaggtaatatgtcacagtttagacaaaactgttcagaaaaagaaatacttcactgagaaagtaaaagtcctactttaccattaagtttaatataagttttcagttttaaaaatggtatttgttgccttctttctttcaaatatcaccctagattggctgagtgtggtggctcacccctgtaatctcggcactttgggaggccgaggcaggtggattgcttgaggtcaggagttcaagaccagcttggccatgatggtgaaaccccgtctctactaaaaatacaaaaattagctgggtgtggtggcgcgtgcctgtgatcccagttactccggaggctgaggcagtggaatcacttaaacctgtgaggcagaggttgcaatgagccaagatcacgccaccacactccatactgggcgacacagcgagactcagtctcagaaaaaacaaaaaactaaaacaaacaaacaaaaaacaagtatcgccccaaatcaagggaggataaaaaacagaaactccatcatcagtaaaactagcagtcatttgtaactgtaaaccacaatatatgaaggatgacaaattactcagcagaagggacgatgatcaagcataaggacctgcagtgagacacttaaaacaaaagaatctgatctaaaatacatagcaactgaggacacaggcagaatgggaagtgggggtgaagcattgggtgggtgatctgaaagtcttaggatcctcaggtccccacacaacccccactctatgggatcagatgacagacctctattctgtctccacaggaatctacaggattattctctagagaaattgaactggagactcagaggtagagaacattaggcacagaaaagactagggttttaggtgaaactctgcagactgaaccataagaccaagtttcccttccttcttctgatccacaacaccaacagccaggcaagagatttacagatatgtctctggagaaactgagatattccagaaaagtcttacggataccagcagataagtctctaatactatgtgatcacctgaggtcaatggattttttacttccactcttgaaataaaagagctttaaaacaaacttttactgcctcattcacagagctttgaacacgtttttagtgtctcattcaaatttaagtggaccactaagaattatctgacatttgaggaaaacctcttacctgaaaaacataggtcaaaacaaacagaaaagcgaggtgcagcagcatgcacctgtagtcccaggtacttgggaaactggggcaggaggatcacttgaacctaggagttttgacactagcctgagcaacatagcgagacaccatcgtattaaaaaaaaaaaaaaaaaaagccaggtgcggtggctcaagcctgtaatcccagcactttgggaggccgaggggggtggattacctgaggtcaggagttcgagaccagcttggccaacatggtgaaaccccatctctaccaaaaaacacaaaaattagctgggcgtggtggcatatgcctatagtcccagctactcaagaggctgaggcaggagaatcatttgaacccgggagatggaggtgcagtgggccgaggtcatgctactgcactccagccagggtgacagggcgagactctgtcccaaaaaacaaaaaacaaaaaacaaaaaaaaatttaaagatccgccatctgcaaatgcagattttcgtgaaaacccttacagggaaaaccatcaccctcaaggttgaaccctcggatacgacagaaaatgtaaagaccaagatccaggataaggaaggaattcctcctgatcggcaaagactaatatttgctggcaagcaactggaagatgtctgactacaacattcaaaaggagtctactcttcatcttgtgttgagacttcatggtggtgctaagaaaaggaagaagtcttacaccactcccaagaagagtaagcacaagagaaagaaggttaagctggctatcctgaaatattataaggtagatgagaacggcaaaattagttgctttcgtcgagagtgcccttctgatgaatgtggtgctggagtgtttatggcaagccactttgacagacattattgtggcaaatgtctgacttactgcttcaacaaaccagaagataactaactgtgtatgagttaataaaagatataaactaacatttaaaaaaatttaaaatattttttagagagagaaaaaaggccagacatggtggctcacacctgtaatcccggcactttgggaggctgaggtgggtggatcacctgaggtcaggagttggagaccagcctgactaacatggagaaaccccgtctctacaaaaaatacaaaagtagccaggtgtggtggcgcatccctgtaatcctagctactcgggaggctgaggcaggagaatagctggaacctgggaggcggaggttgcggtgagccaagatcgtgccattgcactccagcctgggcaacaagagcgaaactccatctcaaaaaaaaaaaaaagagagagagagaaaaaaaatggagaaaaattcaggagaaacagagacgaagcagtcaagaaaatttcgaataaatctaaattagtaactttagagaacatgaaagagaaatgaaaatatagctgaaattaaaagttcattgggactagatgaaaagttgagtaaatatctttaaaagtagaataaggccgggcgcagtggctcacgcctgtaatcccagcactttgggaggccgagacgggcagatcacaaggtcaggagatcgagaccatcctggctaacatgggtgaaaccccatctctactaaaaatacaaaaaaattagccaggtgtggtggctggcacctgtagtaccagctacttgggaggctgaggcaggagaatggcgtgaacctgggaggcggagcttgcagtgagctgagattgcaccactgcactccagtctgggtggcagagcaagactctgtctcaaaaaaaaaaaaaaaaaaaaaaaaaaaggtacaataaaagagataaagaaatggaaaacaagagaagaaattaagaaggtcaattcagaaggtccatcatctgaaaaatgaaagttccagaaagataaatcagtgggcaatgtaccatctaagaaataacaaaataaaacgaccaagaactgcagggcatgaatttctagactaaacgggcaagtctgtgggaatgacagacacatgaatgaaaaaaaacacagtaagatacatttttataaatttaagaacatcagtgataaaagatactcaaagatttcagaaaaaaaaaacaggtcacatactactaagtgggaatgagaatgtcactggacttctcattagtaacagtggaatctataatagaaaataatgcaacagtaccttcaaactcataaaggaaaatgattgtcaatctagaattcttttctttttttaagtttttttttgtttttagggatggggtcttgctatgttgcctaggttggaggacagtagctattcacagtgcaatcatactacacagcatacatacaatacacagtatactacaacctcaaactcctgggctcaagcaatcctcatgcctcagcctcccacagatctttttttcttttttttttctgagatggagttcgctcttgttgcccaggctggagtgcaatggcgtgatctcagctccttgcaacctctgcctcctgggttaacacaatcctgcctcagcctctcccaagtagccgggattataggcatgtgccactacacctggataatttggtattttttagtagagacagggtttcaccatgttggtcaggctggtctagaactcctgaccttaggtgatccacctgcgttggcctcccaaagtgttgggattacaggggtaagccacagcacctggcctctcccaccaatcttgaattctgtacatagacaactatcaatcaattatgagtctaaaataaagttacttatgcaaaatctttaaaaagggactttaagtgaggtaagatttctatactttacttaaattggttatatggctatacaaaacatctatacaaaaaaaaatctttacaaggctctaaaaaatgttcaagtaaccaacagagagggaggaaaaagaaaacaaaattaaaaaaaaaagagtgagaacaaacagaaaacaaaaataaaatggcagacttaagtgctaacataacaattactaattttaagtcatctaaatttactaattaaatgacagagattagcacagattagaaaaaaaaaaatgacccaactacacactgactataagaaattcacttcaaaggtcacttgaaaaaggatggaaaaagatatgccatgcaaacattaatgaaaagaaggcaggagtggttattcataaacatcaggtagatgcaaagaaaattaccagggacagagaggaacattttatttatttattttatttttaagtttttttttttttagatagagtctcgctctgttgcccaggctggagtgcagtggtgcaatcttggctcacaacaacctccacctcccaggttcaagagattctcctgtctcagcctcccgagtagctgggattacaggtgcacaccactatgcctggccaattgttgtatttttagtagagatggggtttcactatgttggccaggctggtctcaaactcctgaccttgtgatccacccggcttggcctcccaaagtgctgggattacaggcgtgagccgccgtgcccagccttatttatttatttattttgagatgcagtctctctctgtcttccacgtgggagtgcagtggtgtgatctcggctcactgcaacctcttcctcccgggctcaagcgattctcctgcttcagcctcccgagtagctgggattgcaggcgcctgccaccatacccggctaatttttgtattttcatatatttatttttttgagatggagtctcactctgttgcacagggtggagtgcagtggtgcgatcttggctcactgcaactgccacctcctgggttcaagcgattctcctgtctcagactcctgagtagctgggactacgggcatgcgccaccacgcctggctaatttttgtatttttagttgagacgggattttgccatgttggtcaggctggtctcgaactcctgacctcaggtgatccacttgcctcagtctcctaaagtgctaggattagagatgtgagctaccatgcccagccttttatattttcagtagagacagtgtttcaccatgttggccaggctggtcttgaactcctgacctcaggtgatccacctgcctcagtctcccaaagtgctgggattacaggcatgagccactgcgcctggccagggaggaacattttataatgattacagagtcaattcatcaagaaggcagacagcaatcctaaatgtgtaagcatcaaacagcagagcttcaaaatacgtggagaaaagctgacagacttgaaagaaatagacaaatctacaatcatacatggacacttcaacatcctctgtcaacaactgatataacaactagactggaaatcagcaagaatataaaataacaacatcaaccaacaagataaaactgacatttacagaacactccatccaacaatagcagaatacagcagatccttgaataacaccatttcgctcaacaccagtttgttgtaacaatgaaaaataatggattcccagctggggccactgtatgaaatttacacattctcctacgtctgcatgagttctctctgggtactctggtttcttcttacattccaaagatatgtacattagcttaactggcatatctaaattgtgacagtgtaagtgtgggtgtgtgtgtgtcctatgatgaaatggtgtcctgactagggttggggcccgcctttcatcgtgagctgctgaggtaggctctcatgaccctgaacaggaataactggataagtaataatcttccttatttttattactttctcttatttatttcaatgtttaacattataagtgttttgtctttatttagaagtttggtgaggtttttgtgactagacatatgccaaaagaacttaaactcctgtttatatcagttagcctatggtaaaattggtttcattgtatgttgtttttgcttaaagtcactgtttccaagaacctactgacaaggttaaatgtgaggatttactgtatacattcttttcaagtggccacagaacattcaccatgataaaacatatcctgggctacaatataactaaaacaaattgaaaagaactaaattcatacagagtatgtagaagtggaaaacaataatggctgagaggagtaagtgtaactaactataaaggggtagcaggaaggagatctttaacagttcagtatttttattttggttatggttaatctatgcatatgatacaattttatacacacacacacacacacacacacacacactgttttaatgtcaattccccagttctgatactgcagtatataaaattgtaaccattagggaaactggataaaggatgtgtgggacttctctgtactacttttgcaactttctgtgaatctataattatttcaaaataaaaagttggccaggtgcagtggctcacacctgtaatcccagcacttttggaggctaaggcaggtggatcacatggtcaggagttcaagaccagcctggccaagacagtgaagccccgtctctactaaaaatacgaaaaaattagctgggtgtggtggcaggcgcctgtaatcccagctagtcgggaggctgaggcagagaactgcttgaactcgcgaggcggaggttgcagtgagccaagatcgcgccactgcactccagcctgggtgacagagcgagactacatctaaaaaaataaataaataaaattaaaaaaattaaaataaataaaagttaaaaaatttacttctttcagctgggtgaggtggctcatggctgtaatcctagcactttgtgaggctgaggtgggcagatcacttgaggtcaggagctcgagaccagcctggctaacatggtgaaaccctgtctttactaaaaatacaaaaattagccaggcgtggtggcgggcgcctgtaaccccagctactcaagaggctgaggcataagaatcacctgaacccaggagatggaggttgcagtgagccgagatcgtgccactgcactccagcctgggcaacagagcaagactcagtctaaaaaaaaaaaaatttacttctttctcaggaagccatggaagtgtatgcaccatcaagatattagcgtaaactatgaaaaagaaagacacagaaaagagaaaccaacacagaaaagacatgaaaaaaatttccaggtaaacacaaagagaaactctattacaatagttacgcagcatccttaagacatcaacctgttcctattgggatagaaaagttagaagactccaagagtgactgcagagggaaataatgaaggaggaggaaacaaagatcatatgataggtctgaatttgtagaaaaattcttttacacatcttattggagacagtggtctgacttggtcatagttaaagaaacaaaacaaaacaagaaaaacccataccattttataatccaaaatccttggaaggtatggacaaatgtcttaattaacagttgctttaacaggtggagggatcactagctgggaatgaaggacagaaaaaaaaaaaaaaaaaaaaaacacttaaaaaacactgatgtgtaccaaagatgaactttacgttatttcacatttctgcctagattgattagccttgcatgtgctaaagtcaactaaatgccatcctggccaagtgtgtcatagattggtgactcccacaacgccttacagagcctctcaaaacactgcttccaggctgacttttggaccttgccagtagctcagagagtggatttacttactgacatgtccattccatgaagtcttcgtgtttcctgaaccattacagtctctagtattttataatacaaaatttctgccagctttagtctgtttacagcaaagtctatcagggaaatacagagaaaacatgtgttaatgaattttagttgttaaggactgaaaagcaaaaattatatataaacttaaatctgatacattaagaatagcagggcaggccgggaatggtggctcacgcctgtaatcctagcactttgggaggcctaggcaagcagatcacctgaggtccggagtctgagaccagcctaaccaacatggtgaaactccatctctactaaacatacaaaattagccggtgtggtggtgggtccctgtaatagcagctacttgggaggctgaggcaggagaatcgtttgaacctgggaggaggaggttgcagtgagtcgagatcatgccattgcactccagcctgggcaactcggtctcaaaaaaaaaaaagaaataagaataacgggagaggaaaaaccgtgaatttctaattttggggggattacttattttcaatgctatgccaactgtagttttcttttcttacctatgtgagatcctggctgttcatctgttgattgagtatagtgttgacagaaagtctctcctattccttttagtattttcataatgttttccacaggattacgcacacaagatctacaaaatacaagaggaaccaattaccaaaccaaacaaaaacaaacaaacaaaaaagactccacaccagaatactaacatgccttcttcttctttttttttttttttttttttgagacggagtctcgctctgtaacccaggctggagtgcagtggtgcgatctcagttcactgcaacctcttcctccagggttcaagcgattctcctgtctcaacctcccaagtagctgggattataggcgcgcactaccacacctggctaatttttgtagttttagtagagatggggtttcaccatgttgcctaggctggtctagatctcctaaccttgtgatccacccacctcagcctcccaaaatgctgggattacaggcatgagccaccatgcccggccaacatgccttctttcaagaattagtttttagcagccaaagttgtattctcagttggaaatctacatatgtaagcaaagctttatatgataaaatattttaacacgtaaaattatataataaaaatacagattgtatacacatgtaataaaactttgctgctgtaagtttgactatactatgtaccttatatgagtggaatcatgcagtattttgtctttttgtgattgactaacttcacttaacataatgtactaaaggttcatccatgttgtagcaaatggcagtatttccttcttttataaggctgaataatattccatctcatatctctatttctttctatctatctatctacctacctacctacctacctacctacctacctacctacctacctatctacctatctacacacacacacatacacccacagcattttctttctctatcaatggacacttaaggtgtttccacaacttggctattgggaataatgctgcagttaacatgatgtgcaaatatccctttgagatgctgtttttaattcttttggatgtatacccagaagtggtattgctgagttatatggtagttctatttttaattttttgaggaacgtccgtactgttttccatagtggctgcaccactttacaattctaccaacagtgtgtaagggtcccaatttttacacattcttaccaacacctgctattttggtttttttggggtgatgagtgggaagtggctatgctgatatgtgaggtattatctcattgtgattttgatttgtaactccctgattagtgatatcaaatattttttcatatgcttttggccagttgcatatactctttggagaaatatctgctgaatcctttatacgtttttaaattgagttatttgttgttcttgagtttcaggagttctttacatattctgagtatgaaccccttaactaatatatggtttacaattacttttcccattctataggttgttttttttactctgttgattgttttctttgctatgttaaagcttttaggtttgacaccgggcatggtggctcacatctatattcccagcacttcgggaggccaaggtaggtggatcacttgaggccaggagttggagatcggcctggccaacatggtgaaacatgtctctactaaaaatacaaaaattggccaggcctgttggctaacacctgttgtaatcccagcactttgggaggccagggtgggtggatcacctgaggtcaggagttcgagaccagcctgaccaatatggtaaaaccccgtctctactaaatacaaaaaattagccgggcgtggtggtgcatgcctgtcatcccagctactcaggaggctgaggcaggagaatcgattgaacctgggaggcgaaggctgcagatcgggccattgtactccagcctgggcaacaagggcgaaactctgtctaaaaaaaaaaaaaacaaaacaaaacaaaaaaaaaaaagcctattccagggttcactattcctagtcagggacgtctagttatatgaggatctctccccaaatcttcatggaatgttggaaaatggcagcccttggctcatgcctgtaatcccagcactttgcgaggctgaagcaggcagctcatgaggtcaggagatcgagaccatcctggccaacatggtgaaaccccatctctactaaaaatataaaaattagctgggcatggtggcaggcgcctgtagtcccagctacttggaggctgaggcaggagaactgcttgaacctgggaggtggaggttgcagtgagccaagatcatgtcattgcactccagcctggcaatagagcaagactccgcctcaaaagaaaaaaaaaaaaaaaaggaaagaaagaaacaatgaccaggttttatttgttttgtttttttgtttttgtagagatgaggtgtcgctatgttgcccgggctagtctcaaactcctgagctcaagcaatacacccaccctggcctctcaaagtcctgggattacagatatgtgccattgcacctggcctctaatatggatatcttaacaatattaagtcttccagtccacaaacacagatgtctttcctttttttttttttgttgagatagggtctcgctctgttgcccaggctagagtacaatggtgtgatcatggctgagctcaagtgattctcccatctcagcctcccaagtagctggaatgcatatcaccatgactaatttttaaattttttctgtagagacagggtctcatcatgttgctcaggctggtcttaaactcctgggctcaactgatcctctcgcctcagcctcccaaagtgctgcaattacaggcatgggccacaacacccagcgtttccatttatttgtgtctagattttttttcttttgcattctatacttcctttttcttattgacatatttgtatatttgctttgtcactgcttttcaacttattcatgtttgaacagtagttcaatccagatctatttactcaaatgatatggaaggtagatccgtgacagtcttcctatcttactggcagtatgcttttcttctgagctatttctgaggctggagattgttctgtctactttcttgtatcctgaaggtttgaggaatgggggagagctcagctatgttcagcttttcttggaggaccagggcttcgctttgtcttctgagatttagttaaatattcctattctagggttcactattcctagtcagggacgtctaggtatatgaggatctctccccaaatcatcatggaatgttggaaaatggcagcccttggcagttgttctgctgggatcctgctggtggtacatacggactttcaattgggaaggtttgtatgactttttatctgtctgcctactcccccatttgtttccctccaaatctgaagtattgatgagaattctcaagatctatcactataccctctttccccaacactgcttagggatgggaataccagaatcatgaattttctttttgatctctactttggaaatttgtcatgaaatcatatctctctcctcatttggttgccattgataaatattttgctggttttgactattctcttattttattaggtattaggaaagaaggttctctgatctggcttcattctaccatctttaccaggaatcatgcttccttaaaaaacaaaaaaaaaaactgtataaaattccattttatgggctgggcgcggtggctcacgtctgtaatcccagcactttgggaggccgaggcaggcgaatcatctgaggtcgggagtttgagaccagcttgaccaacatggagaaaccctgtctctactaaaaatacaaaattagctgggcgtggtggcgcacgcctgtaatcccagctactcgggaggctgaggcaggagaatcacttggacctgggaggtggaggttgcagtgagccgagatcatgccattgcactccagcctgggcaacaagagtgaaactctgtctcaaaataaataaataaataaataaataaataaataaataaatccatttttatggctgtaccaccaatatgcaattagtcccctatctaatggacatttagaatggccccatttaaagttaatgtatgtccttatacaggtgatctttagaaacaaacaaaaataaaaataaattaaaaataaagtcaatgtaaaatcaaaacatgcataactcaggggtagttataagagtgaaatatcagtgctaaataatctttaaggtacacttatctctaaaagtctatactcccatgaaataacattatatataattttttttaagagacaaagttggcctggcatggtcgctcatgcctgtaatcccagcagtttggaaggccgaggcagttggatcacttgagctcagaagttcaagaccagcctgagcaacatggcaaaaccctgtctctacaaaaaatataaaaaattaggcatggtggcttgcacctgtagttccagctaacttgggggactgaggtgggagagttgcttgagcccaggaggtggaggctgcagtgagctgtgattgcggcactgcactccagcctgggagacatagcgagaccctgtctcaaaaaaaaaacaaaaaaaaagggagagataaggtctccctatcttggccaagctggaattagtctcactatgttggccaaactagcttcccaagtagctgggactacaggtgtgtgccactgtgcctgactgttatacataatttttaataggtacttcaatatggttttaggtcaatatattttgtgattgaaatggtatagtaaaacttgccagatgaacatccactatcttgagaattctgaatatactaaaaatagaatggaacaagaaatctaattttaaaaagacatttggaaaaataacagtattgtacatactcaaaaatatttataagttggtcacttggtgcatttttcagaccagccacaatactctgtaaccggctcacactttgggtggctgatgcaacaggagtaatgactgcttctttttctcgtaaatatctccgtccggtcagtggggtagaaggtgcaaatgaccttttctgtcagaaaagaaaaatccgtgagtttttaaaagttaccatcttccttattatgtgtttaattcagtgcatataccatcttctctattcatatttgtaatatccatgaaatttttagcaatactatgctaataacatccttatatttgaataacactttttaaaagcactttctacatataatttcatttaatcttcacaccactgatttgaaagataatgtatacataatttaattttatatatgaggaaataggaacagagaaatttaaaaacttatttcagttgacaaagttaatggtaaagcttggactaaaacttaggttttactatgttctagacaagtgaattttccattagatctcttcctccaacccattttacacataaatacagagttaagccttggccattaacaatcaagtccagagttttatggctgaagttacagaaaaacacatagtttgtgtcacgggtaggaaagcaaactaaaatttaaagcaacgtaacggagcctaagttgaagcaaagaaagaactgtaagaaagcaaaacttcctcttcatgtcaaaagacatatactctactaataaacccagtcatgctgggaaaatggatataaaatatgaatagtaagaaatgaggtaaaaatactaaatgccagttttaaaaattaccttttaaggctttcatgagaaatatgaattagtagaagaagctcaagatttaacttgaaagatgcttctgctgttagtagaatcacacacagagagaaaaagatcattcaagattgaggccaggctaggttatattactttttcaaagtgctgttgaaggttatactccacattagcctgtgctgtcagtttccctaatggggtgtcacgagtgaactttcgaggtgttccaatttcctcttctgcgtctgctcccaaaaagatcctctcatcaaaatcaccaacagttagaacatactcttcatactccttattcactgctttgctgcaaagagaattattataagctgtaatactaagttacacaatggatttattttgacttgaagatagatttagtgtttacagcttagaaaacttgacaactttctaatttttattaactctgaccatctaacaatatcagagggtcctacctgattatggacattcttcaaattcatatatacaaccaataaattactttcaaaagtgagagactacatatacttaatctgaaaactagttgaatctaattatgaaaatggtttctgatcactaaggaaacactagtggctttgaaatatggcaggtggaggttgcagtgagccaagattacaccactgcactccagcctggcaacagaacaagactctgtctcaaaaaaaaaaaaaaaaaaaaaaaaaatgggccaggcgcggtggctcacgcctgtaatcccagcactttgggaggccgaggcgggcagatcacgaggtcaggagatcaagactatcctggctaacacggtgaaaccccatctctactaaaaatacaaaaaattagccgggcgtggtggcgggcgcctgtagtcccagctacttgggaggtgcctgtagtcccagctacttgggaggctgaggcagaagaatggcatgaacctgggaggcggagcttgcagtgagctgagatcgcgccactgcactccagcctgggcgacagagcgagactccgtctccaaaaaaaaatatgggcactgccaacatgtgattaatgaaagaatgtaaaatcaaatacagagtcattgggtctgtttatgagtttctcaagagagtggctgttttttgtttttaagacagagtctcactccgtcacccaagctggaatgcagtggcccagtcttggcacactgcagcctctacctcccaggtttaagcaattctcctgccttagcctcctgagtagccgggactacaggcttgtgccaccatgcccggatagtttttgtactttcagtagagacggggtttcaccatgttggcccaccttggcctcccaaagtgctaggattataggtgtgagtcacttcgagcttggctgagtagctcttttaaatgccatttggctgggtgtggtgggtcatgcctgtaatcctagcactttgggaggctatggtgagaggattgcttgaggccaggaattagagaccagcctgggcaacacagtgagatcccatctctaaaaaaataaaaataaatacgtgtcaatgattttttttctttaattgagatggaatctcgctctgttgcctaggctggagtgcaatggtgtgatctgggctcactgcaacctccgcctcctgggttcaagtgattctcctgcctcagtcttccaagcagctgggattataggtgcacgccatcacacccagataatttttgtatttttagtagagatggggtttcaccatgttggccaggctggtctcaaactcctgacctcaagtgatcagcccacctcggccccccaaagtgttgggattacaggagtgagccaccatgcccggcctctttctttttttcttgtttttttttttggaaatagggtctcactccgtcaagcaggctgaagtgcagtggtgcaatcatggctcactgcaacctcaacctcccagattcaaatgatcctcccacctcagcctcccaagtagctgggactacaggctcacgccactacgtctggctgattttgtattttttgtagagacaaggtttcaccatgttgcccaggctggtctccaaccttctgagctcaagcgatctggctgccttggccttccaaagtgctgggattacaggtgtgagccactgtgcccggccttaatttcttttctttctttttttttttttttttgagatgagtcttgctctgctgcccaggctggagtgcagtggtgcgatctcaacttactgcaacctccacctcctgggttcaagcgatccgcctgcctcagcctcccaagtagctgggactacaggcgtgtgccaccacaccgagctaatttttgtatttttagtagagaccgggtttcaccattttggccaggatggtctcaatctcctgacctcgtgatctgcctgccttggcctccgaaagtgctgggattataggcataagccattgcacgcctggctgagtagctgttttaaatgccaattggccgggtgtggtgggtcatacctgtaatcctagcactttgggaggctatggtgagaggattgcttgaggccaggaattagagaccagcctgggcaacacagtgagatcccatctctaaaaaaataaaaataaatacgtaagtatcaataatttttttttttaattgagatggaatctcgctctgtcgcctaggctggagtgcagtggcatgatctcagctcactgcagcctctgcctcctgggttcaagtgattctcctgcctcagtctcccaagcagctgggattacaggtgtgcaccaccacacccagataatttttgaatttttagtagagatgcggtttcaccatgttggccaggctgatctctggccaggctgatctcaaactcctgacctcaagtgatcggcccgccttggcctcccaaagtgttgggattacaggcgtgagccaccatgcccggcctctttctttttttttttttttttggaaatagggtctcactctgtcacctagactgaagtgcagtggtgcaatcacggctcactgcaaccacaacctcccagattcaaacgatcctccaacctcaacctcccaagtagctgggaccacaggctcacaccactacgtctggctgatttttgtattttttgtagagacagggtttcaccatgttgcccaggctggtctccaaccttctgagctcaagcaatctgcctgccttggccttccaaagtgatgggtttacaggtgtgggccaccgtgcctggccttgatttcttaaaataaatgtatttaaagccaacaagtcttagtgataataaacattcaatgccactaaagcagagagaacttgaatttggaggtcttactttgatatactgttatgcttaacaaatttcaacaaatcaacaaatatgacagcttgtgataagccaggcaccattagtactagatatttacctattatcagtaaaacttgaaaggtccaggaggcattctccttttaatatctgtgaacaaaaaattattttgggacaccatataattaagcatattaatacacacacaaacgtgaaatttatctaaatttccatattgttataacacacacacaaaacagaattattaaatatttctttcagactaggataaactatttagcatgcaaataacttttttttttaacttttttttttttttgagacagggttttgttctgtcaccagggctgcagtgcagtggtacaatcatggctcactgcagcctcagcgtgccaagtagctgggactacagttgtgcaccaccatgcccaactaatttttgtattgtttgtagagacaaggttttgccatgttgctcaggttcgtctggaactcttgggctcaagcaatccacctgccttggcctcccaaagtgttgggattacaggcgtgagccaccgcgcccagtccctgggatcctttaaaaaaagtttactttgctagagatgtttagcatacagacaatgggccataatatagatatctgaggaacacaagactgaatacaaaaatttgtataaaagaagaagaaaccagtaagggaagaatttatgcttaaagaaaaatctcataatatttgaaaagtgggatccataatccaaacccctccttttaccaaagagaaatcttgaggcttaactacatttaatggctcgacgttggggaaataagaaattgaaacccaaaggaacaagccaattcataaatgtagaaatagctaagttaattaccaaggagacaatgtccagaatgcacacagatagcctacaagtggctacaaaactatcatggattttctgctcgatttacatggaattaaaactgtggttgttatacatcatcctacttttagtcaacagtcagcagttattcaaattgtggcagtaaattagtcagcttattctgacctcctgtttttcctaattatttgtcagccctactctgatgttctattctttacaattctttatcagtacctcctacggttgcctctgacagtacatttacccaacagtacatatagttggtcacatttttcaacagctctgtttctcacatcacacaagatcataaggaaattctgaatcacagtagaggctaaagcctgggaatcctgaccctaagttctataatgctgagaacttgcttaaaacatttttttcttttcacattactggtgatctgtaaacatctcagtcatctaattataagtacagtaccttcctgtcaaagagttttgaaatatatggcttaaagtagtgctcctttattccttttgcttctacgagaagtccatcatgcagttcacacagtacagcaatgatgcagggtggctcttcagaagccgtaaagtcagcagtatgaaaatcagatggtaaacctagtttgacagtgtaggaagggcagagggaaaaaaaaatagtcaacttttaaaaatctttttccaaaaactgataatcagttttcaaaaataaataaaaggtcttacctttaaatgatggatttagcaagtcttgtctatttgggcacataatcgcattggcaaaaatcagatccaagcagcatagaagtaaatgataagagtttactaagtcatccccaatcatccgaaaattacctttataagggaaaaaaaaaaaaaaaagacacaaaaaccagaaacctctcatgtcaaatagcaccaagttcccagagtagaaatgtaagaccactgaaagtgtcatcttacccttagtataaacaaaaagtgtccaacagaaattaaacagatccttaacactgcaaggaatcctcctaaaaagggaaaaaaattactttttgtctgactagctcgctaaatatcatgtaaactgaaatagtaaatgtaaatatcaaatagatcaaattacacatgaaattccattcatgaagaaaagtaatctattatttatgaaatggacttaagtaagcctttccaacctgcataaaataatcagaacatagggctgggtgtggtggctcatgcctgtaatcccagcactctgggaggccgaggtgggtagatcacctgaggttaggagttcgagaccaccttggccaacacggtgagacctggtctctactaaaaatacaaaaaatgagccagacggggtggtgcacacctgtgatcccagctactcaggaggctaaggtaggagaattgcttgaacctgggagacagaggttgcagtgagccgagatcaggacactgcactccagcctgggcaacagaatgagactcctcaaaaaaaaaaaaaaaaaaaaaaaaacaacaacagaaagaaaaataagtaaaagtattatcctgaatttccaaatatggataattgtacatggatttaaaaagaaaataattaagttctttgcaggaatacttttcataaaaaacagactttcaaaaaagtatattctcttagtttgtatcataatctttatgtcaattatataaggattaagggctcacctctgcttccggcttcgtggtaactttggtggttcttcatatggattttgaaatatatctaaaaaaattggctcatattttttgaatattacagtagacacctcaaaatttctctctagcctttctatacgttcacgaaattcttgtggtagatttgacatgtccatccatttcttcattttactaaaaaattgtattaaactaaaaaaaaaaaggaggagaaaaaaggcacctttaaaattcatttaaataatggattgaaaggaaatattctattcatgactaagactctttattaaaaagccagatttcccaggcaacatagttaagaccccatctctacaaaaatttaaaaaattagctgggtgtggtggcatgtgcctgtagccccaggtacttgggaggctgaggtgggagaattgcttgagcccaggatgtcgagactgcagttagcctcaatcatgtactccagcccgggtgacaaagcaagacactgtcttacatgaacaaagaacaaacaccatccctcaagcctaaatttaattaaaaaaaaaaagtcctcactatgaaatcactttcgttcccaggatcaccaggggaatacaggttattaattagtggtcatcacatagagtttactgctatggagggagcgagagcacctatctacttcctttattctctatattacctagacaatattttgcataaaatttacaaagttaatgttagttaacagattgacaggttataaaattagtttgagatcacctgagatcgggagttcaagacacagcctgagcaacatgaagaaaccccgtctctactacaaatacaaaattaggagctctccctctccctctccccacggtctccctctccctctctttccacggtctccctctcatgctgagccgaagctggactgtactgctgccatctcggctcactgcaacctccctgcctgattctcctgactcagcctgccgagtgcctgcgattgcaggctcgggccgccacgcctgactggttttggtggagacggggtttcgctgtgttggccaggccggtctccagcccctaaccgcaagtgatccgccagcctcggcctcccgaggtgccgggattgcagacggagtctggttcactcagtgctcaatggtgcccaggctggagtgcagtggcgtgatctcggctcgctacaacctccacctcccagccgcctgccttggcctcccaaagtgccaagattgcagcctctgcccagctgccaccccgtctgggaagtgaggagcgtctctgcctggccgcccatcgtctgggatgtgaggagcccctctgcctggctgcccagtctggaaagtgaggagcgtctccgcccggccgccatcccacctaggaagtgaggagcacctcttcctcgccgccatcccatctaggaagtgaggagcgtctctgcccagccgcccatcgtctgagatgtggggagcgcctctgccccgccaccccgtctgggatgtgaggagcacctctgcccggctgcgaccccgtctgggaggtgaggagcatctctgcccggccgccccgtctgagaagtgaggagaccctctgcccggcaaccgccccgtctgagaagtgaggagcccctccgcccggcagccgccccgtctgagaagtgaggagcctctccgcccgacagccacccagtctgggaagtgaggagcgtctccgcctggcagccacccagtccgggagggaggtggggggggtcagccccccgccaggccagcacccccatccgggagggaggtgggggggtcagccccctgccaggccagccgccctgtccgggagggaggtgggggggtcagccccccgcccggccagccgccccgtccaggaggtgaggggcgcctctgcccagctgcccctactgggaagtgaggagcccctctgcccggccaccaccccgtctgggaggtgtgcccaacagctcattgagaacgggccaggatgacaatggcggctttgtggaatagaagggcgggaaaggtggggaaaagattgagaaatcgaatggttgccgtgtctgtgtagaaagaagtagacatgggagacttttcattttgttctgtactaagaaaacttcttctgccgtgggatcctgttgatctgtgaccttacccccaaccctgtgctctctgaaacaagtgctgtgtccactcagggttaaatggattaagggcggtgcaagatgtgctttgttaaacagatgcttgaaggcagcatgctccttaagagtcatcaccactccctaatcgcaagttcccagggacacaaacaccgcggaaggccgcagggtcctctgcctaggaaaaccagagacctttgttcacttgtttatctgctgaccttccctccactattgtcctatgaccctgccaaatccccctctgtgagaaacacccgagaattatcaataaaaaataaataaatttaaaaaaaaaaacataaaataaaataaaattagtttgagggaaaacagaagtctcccaaatggaaagacaattccattttccaaatgggaatttgattacaaagcaccagattgttacaggttaggagtaaaattcaagagtttgagttccaatgtgtggttccacaaccaaaagtaaagaaggtagcacatactcagaaaaaaacttaatagttctggtgcccaggttggagtgcagtggcaccaccttggtttactgcaacttccacctcctgtgttcaagcaagccaccgtgcccaggccaattctgggtacatttttttatgtccctatgttaacgtggtcttagatagaaaacttgtcatgtcaaagctcacttaattaaaggtctagcaatatatacagaataatacttgtaattttttttttttgagatggagtctcagtctgtcacccaggctggagtgcagtggcatgatcttggctcactgcaacctctgcatcccagcttcaagcaattttcctgcctctacctcctgacagctgggactacaggtgcacaccaccatgcctagctaatttttgtatttttagtagagacaaggtttcaccatgtttgccaggatggtcttgaactcctgacctcagatgatccacctgcctcggcctcccaaagtgctgggattacaggcatgaaccactgcactcggccctatgttctgattatttcatgtagattggaaaggcttacttgagtccatttcgcctggccaatacttataatttctttttaaggtgacagaagacattaatagcaaatcatccaaagctatttaatgtggtttggatgttttgtcccctccaaatctcatgttgcaatgtaatttccttggctgggcatggtagctcatgcctgtaatcccaacactttgggagggtgaggctggaggatcacctgagcccaccagtttgagaccagcttgggcaacacagtgagatctcgtctctacaaaaaatttaaaagttagcaaagcatggtggtgtgtgactgtgggcccagctactcaggaagctgaggcaggaggatcacttgagcctgaggggttgaagctgcagtgagtcatgaacatgctactgcctgggcaagagagtgaaagcccgtctcaaaaaaataaaaaagaaacgtgacctccaatgttggaggtgggcctagtgggaggtgtttgggtcatgggagcagatccctcatgaatggcttggtgctctcctcatggtagtgagtttagttgtcactcacctgagatctggctgtttaaaagtgtggcacttcccaccctcaattgctcctgctctcatcatgtgatgtgcctcctcccccttcacctaccgtgactgtaaacttcctgaggccctcaccaggagcagatgccagccccatgcttcctatacggcctgcagaaccctgggccaaataaatctctttttttaaataagtcacccaacctcaggtattccttcatagcaacgtaaaacgtcctaatacagcattcaaactctggacatgctgatataatctgagactcttaaggacctcattaaaagattcttaccaacagcagcaaaaaatttgtcagattactaaatattttttggcttacaaaaaattatgctcccttacagaggactttaaaaattttgttttttggccgggtgcagtggctcacgcctgtaatcccagcactttgggagtccgaggcaggtggacaacctgaggtcaggagctcgagaccagcctgaccaacatggagaaaccctgtctctactaaaaatacaaaattagccgggcgtggtggcacatgcctgtagtcccagctactccggaggctgaggcaggagaattgcttgaacccgggaggtggaagttgcggggaggtggaagttgcggggaggcggaagttgcggtgagctgagatcgcaccattgcactccagcctgggcaacgagagcgaaactccgtcttaaaaaaaaaagactgtttttatttttggatgatcacattttgcatgtgaaaccctctgctttgaggacatttccacttttgagccttgtctaccactaaacagatcagctttactggaagctaggatgaaggcatataatctgatatcctttatcagatacatctgcttgagattttgaatctgaagctgctggtgcagagaagtgaagaagtggtgaattcttagagcaggatcaatctcctggggcaaataaagtggcaatgtccagggacagcattgctagccatgcaaactatgtccctgctagatggattctgtgatatgctctttggctgtgtggccagcatccttttgttcctggccttttctaagcgtagttttcttaagtcatcctaaagattttatcacctatccaatacttcttttaggtcaggcaaagttggtaagtgatatctcttatttttttgagatagggtcccgctctgtcactcaggctgcagtacagtggcatgattgtggctcactgcgggcttgacttcctgggctcaagcaatcgatcctcccgctccagcctcccaagtagctgggaccacaggtatgtgcccccacacccagctaattttaaaatgttttttagagacaggggtatcactttttgttgcctagactgatacttgctttttataaacaagagccttgactacatcatcatataatccattgtacatactactctcccaagaatggctttcctaacctggaacaaaatgcatcagggtgtttgaaaacaaaaaaaccttatagcactgttataacttaaatcataattacagtttttaaaactaaaataagaagcaaagtaaacttcacagctttcaattcattgggattctgttacaaagaatatgctactgctgggtgtggtggctcatatctgtaatcccagcactttgggtgactgaggtgggaggattgcttgagcccaggagtttgagaccagcctgggcaacatagtgggacctcatgtctacaaaaaacttaaaaattagctagacttggtagtgtgcacctatagtcccagctactcaagaggctgaggtgggaagattgcttgagcccaggaggtcaaggctgcagtgagctgtgaccacatcactgaactccagtctgggtgacagagtgagatcctgtctcaaaaaaagaaaaaaaaaaaaaaaaagaatacactactcaagttgggtgtggcagcatgtacctgtagtcccagctactcaggagtcttaggtgggaggactgcttgagctgaggaattcgagatgagtctgggcaacatagtgtgatctcatcttataaaaaaaattaaaaggccgaagcgggtggatcacaaggtcaggagatcgagaccatcctggctaacacagtgaaaccccgtctctactaaaaatacaaaaaaaaaaattagccaggtgtggtggcgggcacctgtagtcccagctacatgggaggctgaggcaggagaatggcgtgaacccaggaggcggagcttgcagtgagctgagatcgcgccactgcactccagcctgggcaacagagcgagacactgtctcaaaataaacaaacaaattttaagctggcatggtagcttacacctgtaatgccagcactttgggaggctgaggcaggaagatagctttgagtccaggagttcgagaccagcctgggcaacatagagagaacctgtctctatataaagtttaaaaattagcttggcatggtggcatgcacctgtgatcttagctactcgaggggctgaggtaggcagatcgcttgagcctgggaggttgagagtgcagtgagccatgattgcgccattgcactccagcctgggtgacagagcaagaccctgtctcagaaaaaaaaaaaaaaaaaatttaagagagagagagagaagagaatacactatccaagcaagtacatgaaaaggtgctcaacatcattagccatcagggaaatgcaaatcaaaactgggatggctacaataaaaaagatggataacaagaagaattggcaagaatgtggagaaactggaacccttgtaaactcctggtggggacgtaaactggtacagtcaccttggaaaaaagcctgacagttcctaaaaaggttaaacacagggctgggagcggtggttcacgcctgtaatcccagccactcaggaggctgaggcacaagaatcgttgaaacctgggaggcgcaggttgcagtgagccgagatcatgccactgcactccagcctgggtgacagagtgagactctgtctcaaagaaaagttaaacatagaatcaccatatgactcagcaattccactcctctccatatatatccaaaagaaaaaatatatgtccacataaaaagttgtatacaaatgttcatagcaacactaatcaatagccaaaaggtagaaataactcattaactgataaatggataaacaaaatgtggtatatctatgcaatggaatattattcaaccataaaaagaactgctgatacatgctacatcatggatgaaccttgacaccattatcctaaagaagccaacacagaagaccacatattatacgattccatttatatgaaatgtccagaatagaaaactctatagagacagaagttggatcagtggctgccaagagctgggtgtgggggttggaatacgaagtgaatgctaacaggggtttctttttggggtgatggaaatgtcctaaaatggattgtggtggtggtacacaactctgtgaaaatacaaaaaaccatggaactgtacagtttaaaggatgaattatatggtatgtcataatatctcaataggctattaaaaaatacctccccacaacactactccaaagaggttacagtaaatacatgtaaatatgttagaaatattaatttgttcacttttttttttgttgagatggagtctcagtctgtctcccaggctagagtgcagtggcgcgatcttggctcactgcaacctccacctcctgggttcaagtgattctcctccctcagcctcctgagtagctgggattataggcacatgccaccacacctgactaatttttgtatttttggtagagatggggttttgccatgttggccagggtggtctcaaactcctgacctcaggtgatccacccacctcggcctcccaaagtgctgggattacaggtgtgagccactgcaccggcctaatttgttcacttttctagaggcaatttggcaacatgaataaaaagccttaaaaatgctcaagtcctttcatccagaaattactttttaaagactctaacctaagaagaaagtaaaaaatacaggcaaaaatacaaagatgcatatcatgatactttgtgtgaaggtgttgttttttaataagtaatatgcacaagcacaaaattctaaaagttactaaagcatgtataatgaaaattctctttctcatcacctgcctcccagtttttctccactaaggcaatcatggttgccttagggactaatagactgtcaccaggttttgtttatctttgcagaggtattttgggaatttataaacatataccagcatacataattttttccactcaaatgatgtcatactacaacagtagtccccccatttatcctcagggaatatattgcaagactcaagagatgcctgaaactgcaaatagtacagaaccatatatagagtatatattttcctatacgcatatacctatgataaagtttcatttacaaattaggcacagtaagagtttaacaataataaaatagaacaattataacaatttactataataaaagttatgtgaatgtggtctctctctctttctcaaaatatcttattgtactgtactcacccttcttgtgatctgtcaatctctgataactgagagggccactaagtggccaacaggcaggtagcatacacagcatggatacagtaaacaaagagatgattcacgtcccaagcaggatggagtggatagcacaagatttcattatgctactcaaaaccatacacaatttaaaacttaaaattgtttatttctcgaattttccatttaatattttcaaaccatggctgatgggctactgaaaccatggaaagtgaaaccaaggataaagaaggattaatgtacctacaatattctgcaccttgctttttcctctaatttatcttggacatgtttttacatcagtaaaaccccttctatcactttaacagctggagtttattccattgtataccattccttttatctcttaaacttttcactttgaaataccatcaaacctacacttgcaaggagagcataagaagtcctttataccctttaccaaatattaacattttgcatatttgctttatcattttttttttttttttttgaggcagagtcttgctctgtcgcccaggctggagtgcagtggcacaatcgcggctcactgcaatctccgccttccgggttcaagcaattttcctgtctcagcctcccgaatagctgggactacaggcgcctgccaccaagctcggctaattttttgtagttttagagagactgggtttcaccacattggtcaggctggtctcaaacgcctgacctcgatgatctgccccaccttggcctcccaaagtgctgggattacaggtgtgggccaccttgcccagccatctatatatacatgtatactgtatatacatatgcatatatggtagtaaattttatgtgtcagcttggctgggccacgatgcccagatattttctcaaatattctggatctttttgtgaaggtgtttattagatgaaatcaacatttagattggtggacttttagtaaagcagattactcttcataatgtaggtggaactcatccaatcagctgaaggtcttaatagaaaaaagactgacctcccttgagtaagaagaaattctaccacaagactgcctcaagactcaaactgcagctcttccctcaagatgaagactcaaagtgcagtctccaacatggggcctaccccatcagactttcaactctccaagcctccatcgtgtgagccaattccttaaaataaatttttctctatatatagcttgttggctctttttctctggataatcctagttattgcaatatacatataatttttttctgaaccatttgagagtcacgtttagctttcatgccctttacccaaaaatacttcagtttctattttctgaaaaaaaaaaaaaaaaattctcttacataaccaaagtacaattatcaaaatcagaaaattttacattgataaaatattagtccatatttcaacttaaatttaaaatttaccaattgtccaaatgttctttcggagcaattttaaacatcctaatccagtagcatgtattgcatttaggtgtcatttcctttctgtttctttcagcctggaaccagttcctcagacttctttgtaacacgaacattttagaagacaattggtcagttatttgtagtatgtccctaatttgggtttgtctcatgcttccctcattattagatttaggctatgtatttttgacaagagtattacctaagtgatgtcatatccttgtcagaggatcatatccattagtcccattactgataactttgtacttgatttaggtggtatgtgccatgttttccatttcaaagtttctattttttcctttgtaattagtgattcataggagacactttgcaattacgtgaatattctgttcttcatcaaacttttattcactagttttaatatccattgatgatctttgactgtatcaattattactatgaggttgcaaaatggtgactattttctaattctaccactttttctacatttattagctggcattctaatgtaagcagcattcctttctaataacgggagtctaccaatgggagtcttttcaacctagcttctaagttccttgacacacctccaccattttgttgagcactccttactttctggcataagaagctgttccagatgcatcagagaaaacacgtctgctaagcattggaatcagccatttccttgaggacattacgataagtgaaataagcatgtcacaaaagaacaaatattgtaggatgacacttctaagagatgctcagagtaatcaaattcatagaggaagaaaaagtagaatggtggttgctgaggctgggggtaagggtgaaatgggcagttttcattttggttttatttgaagtttaacactaatattttcctatgtaaggcttaatgtatagttacaatgatctgattagtcaagatggtctttttttggggggcgggcagggggaaggtatatttaacatttcacactgaagatgtaactgtcatgggttcctagcactttaggaggccgaggcaggcagacccttggagctcaggagttcaagaccagccttggtaacatggcaaaccccatctctataaaacaaaaactacaaaaattagcctggcatgatggtgtgtacctgttaagtcccagctacttgggagggtgaggtgggaggactgagcccaggaggtagagactgcagtgagctgaggtggcaccactgcactccagctgatgccacagagtaagaccctgtctcagccaaaaaaaaaaaaaaaaaaccctcaaatgccataacagcagtgtagacaaaaaataacaaatgattataatttttagaaaaagaaactttttttgttatcaagtttcccaagatctaaaccagctgtttagccaatcttttatttgggtctttatatcggccattaacttagtgatgttatctgatttatctgggatatagatacttagtttttgagaacagggggcagccagttgagatttttagatgctgggcttaaagcattttttttttttttttttttgagaagggtcttgctctgtcacctaggctggagtgcagtggcatgatcatagctcactatagtctggaactcctgggctcaagtgatcctctacctcagcctcccaagatagctgggactacaggtgcatatcaccacacttcactaacattctttgtaaaatttttttgtagagactaaaaagtagtctcttactatgttgcccaggctggtcctgaactcctgggctccctcccaagcgatcctcccacctcggcttcccaaagcgttgagattacaggcatgagccaccacgcccagcccacaaaggtttctatatgtaagctactatggtgacttttctgaagtttacgtaaaattgtccagtttcagtttgccaggcttcaggaaaaagcagttttaattttagtgatttcaagtcagaaaagtgggagaaaaatttagaaacatcaatttcaagacttgcagacaggaaagaattcaggacttagtccaaattctatgcaaataataaatttaaaaaaatagtcaaggctggaatttaataataggtatgctataattttgatagaatgtacttttttttttcctcttcaattccccatttttaccaaagattaatcttagtgggaccaatttactttctttttaaaaatatttattttatttatttatttgattttattttttgagacaagagtctcgctctgttgcctaggctggagtgcagtggcaatcttggctcactgccacctctgtccactgggttcaagcaattttcctgccttggcctcccaagtagctgggattacaggcaagcaccaccatgttcggctgttttttgtatttttggtaaagatggggctttactgtgttggccaggctggtctctaactcctggcctcaagtgatctgcccatcttggcctcccaaaatgctgcctgtgcctggtcccgccgcaatttactctctctctcttttttttttttttgagatggaatctcactttgtggcccaggctggagtgcagtggtgcgatctcggctcactacaacctccacctcctgggttcaggtgattctcgtttctaagcctcccaagtagctgggattacagacacccaccattgcgcccagcaaatttttataattttagtagagacagggcttcaccatgttggccaggctggtctcgaactcctgacctcaatagatccacccgcctaggcctcccaaagtgctgggattataggtgtgagccaccacgcctggctcgcaatctactttcaaaataaggtttagtaatatatttggcctgattctttgcatagggggcaataagaatagtgagtggccacctaggctcttttaagttggttttgttggaacattcataaggaattttggattagacttttaaaagccttgaggctaagaagtcaagccaaggatccatcatcagactgttcccataatacctgtatgcattgggtgaaatcctctcttcctgaagtccccaaaaatatcttgaggttcctgggcttgtcagaaagtgacatcttttacttactgcaaggtcagggaccttgttagggaacctttgaacaataatgattgctcaaggaattgctttgatcaaagggacagtcatgtagtctgaaacagtttccaggaccacttctctcttgtttaaaattcagctttggtcctttgtaatattcccccctccatgagactcaacttcttaggaatgaaccttcctaatggtgtgagatattgacttaaacatgacccaaatacatgattgttctgcaatggcgagtcaatcttcccaaatcttttttatcagctctataaagtaaaccttggctggtgcggtggctcacacctgtaatcccagtgctttagtgctttgggaggcaaaggcaggaggatctcctcaagccagaagttcaagaccaacctgggcaacaaagccagacccagtctctaagaaaagacaaaaaacaaaacaaaacaaaaacttagccaggcatggtggaatgcacctatagccccagctacttaggtcactgaggcaagaggacagcttgacccccccaagtttgaggctgcagtgagctatgatcatgccattgcactccagcctgagcaacagagtaaaagcctgtctctaaaaaacaaaaacaaaacaaaaacaacctcaatgttttaaagcagtctggtcatatctgaaaatttgccattccaatcaaagcctaggtaaaataaccagtgtctatgattgtgtccttagaagcagaactttaattccagctccatcaagtgtggaattggttgcttgaacaaagtatgaatctcaaaccaaaattaggaagatttgaaatctgagaggagactcaccagagacccctgctggctcagcgagattgggtgaatggtaccaaggctccaattataatatcagtaaatggaggctcgcttcaggtcacttcatggttgccaaaatgtcaactggccaggagacatagggcagcagcagcccctagaagacagcacagagcatgtgtctctatgccgggggagcctgcaaggctgggccaggatcataaggtttctccctcactaagggacaacgcaggggcctagggacaagaatacaaccagaaaccccagggacctgcgtacctccttctttttctcctcctcaggttggggccagccatcccccctgctggtgatgatacagtcagccctgcacctcagtggagcagagcacagcatagttcactgaggcagagctgggctggactaacagctaaacagctgagttaccatttaatgtgtatagtttgggaagataagaaagttcgggaaatggtggtggtgttggttgaacaatgtgaaggtgaaggtatgctgaacttaaaaattgtcaactttatgaattttatgttatatatattttactccaccaccaacaccatacacatacaaacacacacacacacacactctctctctctctagagtttaccctccatatctgtgagttccacatccatggattcaaccaaccacacatcaaaaataattggaaaaaaaggatggttgtgtccgtattgaacatgtaccaacttcatttcttgtgattattccctaaagtatacagtgtaacaactactgacatagtatttacattgtattaggtataaataatctagagatgggaccaggtgtggtggctcacccctgtaatccctgcactttgggaggcgaagatgggtggatcacttgagctcaggacttcaagaccagcttggggaacatggtgaaaccccatctctaaaaaaaaagagctacaaaaattatctgggcatagtggcacacacccgtagtcccagctacttgggaggatgaggtgggaggattgcttgaatctgggaggcagaggttgcagtgagctgagatcatgttactgtactctagcctgggcaacagagtaagaccctgactcaaataataataaaagttaaaaaaattatatttaagttgaaattttgaaaacagcccaaattattataagtcaaagcaaacaaaatcatttgaaatttttgtttatttctctgaatgaacacattgatgctgggtaactgctcttttagcattaaaaatttgacacttaaaaacgttttgcggaaggctgggcgcggtggctcatgcctgtaatcttagcactttgggaggctgaggcgggtggatcacttgaggccaagagtttgagaccagcctggccaacatggtgaaatcctgtctcaactaaaaatacaaaaattacctgagcgtgatgaaatgcacctgtagtcccagctactcaggagggcgtggtgggaggatcacttgagcccagaaggcggaggttgcaagtgagcagagatcgcgacaatgcactccagcctgggtgacaaggtgagaccctgtctcaaaaaacacaaacaaaaaataaaaaagataaaaacaggctgggcgcggtggctcacacctgtaatcctagcactttgggaggccgaggtggatggatcacaaggttaggagttcaagatcagcctggccaaaatagcgaaaccccgtctctactaaaaatacaaaaaaaaaaaaaaaaaaaaaaaatacaggtgggtgtggtggcatgcacctgtagccccagctactggggaggctgaggcaggagaatcacttgaacccaggaggaggaggctgcagtgagcagagaccgtgcattgcactccagcctgggcaacagagcaagattctagctcaaaaaaaaataaacattttgggggaaagggactttgagaatatcaatctacattttaaaaagacttagttttcttttttttcataagtttgtaattatttttaatggatttttttttttttttgagagtgggtcttgctttaccagcctggctggagtagagttgcatcatcataactcactgcagcctccacctcctgggttcaagtgattctcccacctcagcctcccgagtagctgggattacaggcatgcaccaccatgcctggctaatctttgtagaaacagggtatcaccctgttgcccaggctggtcttgaactcttgggttcaagagatctgcccgccttggcctcccaaagtgctgggattacaggtgtgtgccactgggcctgaccaaaaaagatacatcttttgacccatttttaggaatcatacatatttttggaatttatcagaaatatcatctttacaatgatgtttatttgtccgcaactacaaaggactggatacaatcgaaatggccataaggcatggctaaatagatgaaagatccttataccctaaaatatcctagtatcattaaaaaaattaatgaggtagaactacatatgctgatatggaagaatttccaaaatataaagaaaaataactgtagagcaacacatatagtataatttatgttttaaaaagaaaaaacaccagcctgggcaacatggtgagacccgtctctacaaaaaatataaaatttgccaagcatggtggtgtatacctgtggtcccagctactcgggaggctgaagtgagggatcgcttgagcctgtgatgtctaggctgtagtgagctgtgatcacaccactacactccatcctgagtgacagagcaagactctgtctcaaacaaataaagagaaaagaaaataaaaagaaaaaataccaaaaaacaagtttatatatttgtacataggaagacctttttttttgagacagagttttgctcttgttgcccaagctagagtgcaatagcacaatctcggctcactgcaacctccacctcctgggttcaagaaattctcttgccttagcctcccgagtagctgggattacaggtgtgccccaccatgcccgactaattttttgtatttttatagaaatgaggtttcaccatgttagccaggctgatcttgaactcctgaccccaggtgatccgcccgtctaagccttccaaagtgctggggagtccaggcatgagctactgcgcctggccagaagaaattattaataatggttaattacggagagtgccaaaaggagacgtttttcttttcttttcttttttttttttttttgagatggagtttcactcttgtcacccacactggaatacaatggcacgatctctgctagctgcaaccttcgcctccctgggttcaagcaattttcctgcctcagcctccccagtagctaggattacaggcacccgcaaccacgcccagctaatttttttgtattttttagtaaagacggtgtttcatcatgttggccaggctggtcttgaactcctgacctcaggtgatccacccgcctcagcctcccaaagtgctgggattacaggtgtgagccactgtgcgtggccaaggatactgctttctacttataagccttctgtattatttaaaatttttgaaaatacatttgtgtgtacgtgtgtgtgcgtggtaaaacatacataacctttaccgttgtaaccactgttaagtctatagttcagtagcattaagtacattcacactgtgcaaccatcaccactgtccatctccagagtttgtttcattatttgaaatttgattttttttttttttttttttttttgagacggagtctcactgtgtcacctaggctggagtgcaatggcgcaatctcggctcgctataagcgccgcctcctgggttcacgccatactcccacctcagcctctcgagtagctgggactacaggcgcccacctggctaattttgtttttgtatttttagtagagatgaggtttcactgtgttagccaggatggtctcgatctcctgaccttgtgatccacccggcttggtctcccaaagtgctgggactacaggcgtgagccaccgcgcccagccttgtttttttaatttgaaatggagtcttgctctgtcgcccaggctggagtgcagtggcgctatctcagctcactgcaacctccacctccaaggttcaagtgattctcctgccatgtactgctctacatttgttttgttataattcttttttgtttagttcccccagaatctgtcattacaaagatttttgaaattatatgaacaatgacaaacattgacagaaaaagatcagattgttttatactaacaatgataatgtcttgctcaattaaaaaattaaccccattgatcttcatttaatttttatcatcttattttatttttagaaccaaagttgtttaaaaacattttttttaggctggacacggtggcttacgtctatagtcccagcacttagggaggccgaggcgggtggatcacctgaggtcaggagtttgaaaccatcctggccaacatggtgaaaccctctccctattaaaaatataaaaaattagccaggcgtggtggcgggcgcctgtaatcccagctactggggaggctgagatcaggccattgcactccagccggggcaacaagagcaaaactccgtctcaaaaaataaaaataaaaaaaaatttaaatttagcatcaactaaaacctatttgccatttctgaatagggctttaaactttgctcctcttctattctggaaacacaggaatagcaaatagacaatgaccacaaatagttttgtcccagaaacaaagaatattagcatgaatccaaactggatagctaaatttgttttgtttcctatccagccaaataattctatatgcttgatactagagtaagtaaaagatgtatctgagacccatagagtagctgcaaggtgaaaaaaattaatatacagtagagaaataggacaacatcttgaccagatgacaaaaattaacatcaccaatgagatgcagatggataacacatgccatcatcagatgtgatatcctcaggagacaaaatcacttatacagttttccatcagggaatgactaacctgcatctaatcaaaagttaataggagacaaatccaaaattgggaaccatctattaaaagaggggatgagggtgggcacagtggctcacgcctgtaatcccagcactttgggaggctgaggcaggcggatcacaaggtcaggagtttgagaccagcctggctaatatggtgaatccacatctctacgaaaaatacaaaaattagctgggcgtggtggcacatgcctgtagtcccagctactcaggaggctgaggcaggagaatcgcttgaacccgggaggcggaggttgcaacgagtccagattgcaccactgcactccacctgggcaacagagtgagactctgtcccaaaaaaaaaaaaggctgaggcaagaggaccacttaaggtcaggactttgagacaagcttgagcaacatagtaagaccctgtctctataaaaagatttaaaaatatcagtcaggcatggtggcacatgattgtagtctcagctacttgggaggctgaagcaggaggatcatttgagctgaggagtttgaggctgcagtgagctaaaaaggtgccactgcactcgaggcctgggcaatacagcaagactcggcctctaaaaaaattttttttaattaaagaaagggacaaagtgattgtggattatattcttcaaaaatggtaatgtcataaaagaaaaagaaaggctgtggaaatgttcctaattacagaagaataaatagacatgataagcaaatgcaatacctgatccttaattagaaattgtacttccaggaaaaaaaatgccataaagaacattattgaatcaactaacaaaactagaacagagttagcaggttaaataaaattattttatcagtgttaattttgctgaagttggtagctgtactgtagttatttaaagaaatacacagtgaagtattttggggtaaaaggctacaaatgtatgctacttagactgaaatggttgaggataaaaagagaaagatctggctgggagtgctggctcacgcctgtaatcccagcatttagggaggctgaggcgggtggatcacctgaggtcgggagttcgagaccagcctgaccaaacatggagtaactccgtctctactaaaaatacaaaattagccaggcgtggtggcacatgcctgtaatcccagctactcgggaggctgaggcaggagaatcgcttgaacccaggaggcagaggttgtggtgagctgagattgcaccactgcactctagcctgggcaacaagagcaaaactccatctcaaaaaaaaaaaaaaaagagagagagagaaagatctatatattgaagaaagaaaaatcaaatgagaaagcaaatgggataaaatgtcaataacaggtgactctgagtcaagggtatatgggtattgtccttttcttatttttgtaacttctctgtaagcctaaaattatttccaaattttaaaaaattaattttaaaaagtatagctaaagattcaacacagaggtttctagcagaatttgagaaaggcagagaaagaatatgaaaattgggaaaggattatctatgttataacttagaattaaatgaagtcacacagtggctcacgtctataatcccatagcactttgggaggttgaggtgggtagatcatttgaggtcaggagttcgagaacagcctgaccaacatgatgaaaccccatctctactaaaaaaaaaaaatacaaaaaattagccgggcttggtggtgtgtgtctgtaatcccagatactcaggaggctgaggcatgagaatcacttgaacccaggaggcagagattgcagtaagccaagactgtgccactgcactccagcctggctggcacagtgagactgcgtctcaaaaataaataaataaataaataaataaaataaaaattaaatgaagtcaaatgatctcaaaacaagagaaaactgattccaaaatttagagcttatataacatttaaaaacatcaaagaggtttaccttaatttagctgaacgtagtattctggtaagtgaaacacagttgccttccatgataccctttccaaccgtgggaataatgcttttgcggcatgcaacatataatgaacatgccaaccagtgtgtaacttctccctggcaagcaaaagacaaacagcaaaacaggtataatattatgttaaaatgctttaattctagaaacaagagatgtagaattatctggtctcaattttccttatgtagataaagggccagagaagtgaagatatttgcccaaggtcacaaagctgttagttgcagtaatgggtataaaactccttactcttagttctgtgtttttacaactataacatgctaaattaatattaatctaaagataaaagcctggcttggtggctcatgtttgtaatcccagtaactcgggaggctgaggtgcgagtatcacttgatgccaggagtttaagactagccagggcaacgtagactctaaaaatgaaaataaaaaaattagccaggcatggtggtgcttgcctgcagtcccagctacttgggtggctgaggcaagagtatcgcttaagctcaggagttcaagactgcagtgagctatgtttgtgccactacattccaacataggcagctgagcgagatcctgtctcttaaatcctgtctcttaaaaaaaaaaaaaagaaaaaaactctttcacctacactccaaatctaatacaggcatatgccacataacatcttggtcaacactggaccacatatacaatggtggtcacttaagattataatacttgccaggcgcggtggctcatgcctgggaggctggagcgggtgaatcacttgaggccaggggttcaagaccagcctggccaacatggcaaaactccgtctctactaaaaatgcaaaaaattagctgggtgtggtggcatgcacctgtagtcccacctacttgggaggctgaggcaggagaatagcttaaactcgggaggcagaggttgcagtgagtagagatcgtgccactacagtctagcctgggcaacacagggacactctgtcacacacacaaaaaagattgtaatactgtatgttctaactgttctatatatttaaaaaattataatttactgtaccccttttatgtttagatacacacatactcaccattatagttgcctatagtgttcagtacagaaacatgctgaacaagtttgcagcccaggagcaacaggctatattaaacagcctaggtgtatagtagactacactatctaggtttgcataagtatactctgtgaagttcacacaacaaaatcacctaatgttgcatttcttagaccatgtccctgtcattaagtgaagcatgtctgaattaccagaagagttttattaaaatttgtcagcatgactttcttgattttaagaaatggccttgatgatcctgaagtttctatcgtttttgctttatgtttctctttagtgtggcagggaaaggcaagaacagagtaaaaagttggcaagggagtcacacataaaaaattaatattaatcttacgcaacatgaaggagactgtcatttttgtaaggtaaacatttggggatttaccccaaaacatgtcatctttaaaatacagtcatatgcattgcttaatgacagggatatattctgagaaatgcaacattaggcaattttgttgtgcaaacatagcatagcctactaaacctaggctatatggtatgcttattgtttctaggctacaaacctgtggagcatgttactatactaaatactgttggtaaatgtaacacaatagtaattatttgtgtatctaaacacagaaaacatatagtaaaaataaagtatgtgtggtccatcactgactgaaacattctgcagcacacgactgtagtaagcacggctctttatattagtagatatctcaatttacaatgccacaaaaaggtgacatttgggaattcaacaattttctgcattagacttcagacatctccaagctagaatcacttcatgacttcactgctgaaatacaatagctgaagtttaaggattaagaattacggataggccggtgcggtggctcacgtctgtaatcctagcactttgggaggccgagatgggtggatcacctgaggtcaggagtttgagagcagcctggccaatgtggcgaaaccccgtctctactaaaaaatacaaaaattagccaggtgtggtggcgcacgcctgtaatcccagctacttgggaggctgaggaaggagaatcacttgaacctaggaggtgggggttgcagtgagccgagatcacgccactgcactccagcctgcgcaacgggagtgagactccatctcaaaaaaaaaaacaagaattacagataaaggccaggcacagtggctcatgctcgtaaccccagcactttgggaggctgaggcagaggattgcttgagctcaggagttcaagatcagcctaggaaacatagtgagacccccgtctgtacaaaaaaggaaaaaattagccgggtatgtggcacgtctgtagttagagctacctggggaactgagatgggaggatcatttgagtccagaaggttaaggctgcagtgagctgtgactgacccactggactccagcaagggtgaaagaacgagactctatctcaaaaaaaaaaaaaaaaagaattacagatgtaaatctgatagcacaacacaatagtgttcttatacactgttccacagactgtctttaagaccaaaccctagaaggataaaaagattgataaaaagatttcttgcaataatctaaaaggggtgggtagaaatgggtggccatcaataaacccaatgttcctaccctgaaggaatgagaagtcttttctcaaagcactaaatgaggcaggtaagcttaaagatgaatatttttacaagctttgattaatgaattgcttgggaatagggtctggtcatggtggcttacgcatgtaattccagcactttgggaagctgatgtgggtggactgcttgagttcaggggttcgagactagcttgggtaacacagcaaaaccctatctctacaaaatacaaaaaaattagcaggacgtggtggtatgcgcctgtagtcccagctactctggaggctgagatgggagaagtgcctgaggccctttttttgtctcaaaaaagaaaaagagaaagagttgtttgggattagcatccaagtattatagagcctttggatacaggctactaaatgaaaattctagcaagatggtgaaaatataagtcctaaaattattgtttcgatttttttaaagacattaaagaatacactgatttttattttactttttaaaacagggtctcactctgttgccccaggctggagtgcagtggtacaatcagggccactgcagtcttgacttcccaggaatgagggccactgcagcctcgacctcccaggctcaagcaatccccccaccttagcctctggagtagctgggactaaaggcacatgccaccacacccagctaatttttgtagagatggggtttcaccatattgcccaagctggtctcaaactcctgggctcaagtgatccacctgcctcagcctcccaaaatgtcgggataacaggtgtgagccaccatgcccagcctattttattttgtgtagagatagggtctcactatgttgcccaggctggtcttgaacttctgggctcaagtgatcctcctgcctcagcctcccaaagtgctgggattataggtgtgagccactgtgcctggcctgactttctttccttaaaaaagtcaactattttattccatgagaataaaatagaatacaattctatttgataaaatcctatttcataaaaattctatgaattctatgatatcagaaaccattttttgcatttctaaggcctacttgccaggccttagaaatacaaaaaatgttttctgatctcacagaacttcacatctggagctaagaagaggaacagatactatcatttataattggtgagatatacaagctataagaagaactgaagataaagtgttgtaggagaatatagtgcagtgaataactgattttgactacagtttagggaaggcctcacaaaaggagacaaaatttgtaaatcaataaaaatgtaagcaggagtttgtcaggtagactagagaggggtagggattggagaaagacttcttaggaagcatgagatatatgaaaatgactactccaaatacctttaaaaaattgattttaaaaaaagaggaaaataaacactggatagaataaacacaaaatttcagttcatacatttgtgctttctaaagcaagcattgggctgggctcggtggctcatgcttgtaatcccaatgctctgggaggctgcggcagaaaaatcacttgaggccagttcaagaccagcttgggcaacatagtcagatactatctccacaaaaaattgaaaaattagctgagcaccgtggtgcatgcctatagtcccagctactggggaggctgaagcaggaacatcacttgagcacagaagtttgagtttacagtgagctataattgcaccactgcattccaggcctggtcaaaagagcaagaccctgtttctttccattttttttttttttttgagatggagttacactcttgtgcagggtggagtgcaatggcgtgatcttggctcactgcaacctctacctcctggtttcaagagattctcctgcctcagcctcctgagtagctgggattacaagtgcacgtcaccatgctcagctaattttatatttttagtagagacggggtttcaccatgctggccaggctggtcttggacccctgacctaaggtgatctgcccacctcagcctcccaaagtggtgggattacaggtgtgagccaccgtgcgcccggccaagaccctgtttctaaggaagaaaaaaagaaagaaaaaataaataagtagagcaaacattgaagatgtcctattcaactctgcctaactagagatttagctctcaacttttcctggtgttgggggtgaggggaaatattccaggcagagggaatggcatggatataccacaaaactgggaacaaacttgtcatattcaagaatctgaaacaggtgcatgccttgaccatagtttgacacagtaaatgcttattcaatgacagatggtgtgaccttgggcaagagagaccaaatcagacctaggatgtcagaaatgctttctcaggctttcaaaaatcaatctgttttcaattgagacgccattcattctaatctcccttactttcttattcttcccacagctctccagtcatgccacccacggatgtggaccattgtcctttacccagtctatccagttctgaagacacttttttcaggtactactccttcatatataggcacacatacaatcgacacttttccaactctatgcctttgaacccagcaattatttcactgggtggtgagtcagtggtgcaccctgggagtgggtccagcgcccttggcacatgaaagcctttgaacatgaggccagtggtgctacatgaaatacactccatcacaattctgtctacactgggcttatgctcgtctgggtttctttctctgtttttagatagagtcttgctgtcacccaggctggagtgcagtggtgtgatctccactcactgcggcctatgcctcctgggtttaagcaattctcctgcctcagcctcccgagtagctagattacaggcaggcgccaccacacccagctagtttttgtatttttttagtagagatggggtttcgccgtgttgcccaggttagtctcgaactcctggcctcaagtgatccgcccgccttggcctcccaaagtgctgggattataggcgtgagccgccacgcccagcctgggtttctatattagaataatcctaggcaagacaaccttctgagccttgccattatcacctggaaagcagtctaatactcattgccatgccatgttcacagggctgttgcgaggataaaatgcaagaatgatggggaaaaaaatcaagtaattataactgacatttgttttattcagagccagacactgatgcaaagcatcaggacgatgctctgacggaggaggaaacgtagggctgagatcagcttcgtgtgcacattggctttgatcaaactgctgcacagcgaccggcagctccaccctggtgaagcagagggtggaggttaaacggctcagaccctgggtctggctccatctctaaccgtgtgaccttgggcctgtagcttaacccgtctagggctccgcttcctcttgcgtgaaatggggatcacagaaggggttcagacggaactgagggtccatttaaagctctgggcagtgatgtcttggcatgcagttcattttcactttaccattatatttgttcttactgatttaagggcagcaccatgacttttgtggcgcttggcggggtagagggaagtgtggtcaggaagcctggggtctgagcggcgcgggacctaggccgctcctttcctgagcttcagtttcccgcctcaaaatgatgggtggattggctgagctacacccacctttcccgcccctcggcgcttggctgcgcagcgaccctcctaggtggggaaactcccaccaccccataggccgaggaaggggcggggcaggggtggggcctggcgagggtagggtccggccgccccacctgctgccgctcacctctaggctgtagttgcctcggatggcagtaaagtcgtccagggcttcggccgcgctcccctcgtccaggttcagctcctggcacagggcctgtagcgcctccccggctgcggcgaccaccgccgccccctcagcgtggggcttgtcctcgaacatcccttcaggccccgcgggctgcgcgccacggcccccgacttctttctccctcccaggcgcgctacccacaaccacctgcgccaaagcgcgcgaaaatctgcagctgcgggacgtgttgtcatccaccgtctgcctccgcttttctcctcaaaaaaagtccgtttttcctccggagctcctagcagtccctccccggaaatgtgataagaagatgtacctcagattctgaaagacctgtccttggcccttggctggtcgcggggggcccagccggcgggacagaaaaagagcggagggatcctcagcccgcgcgcagagcctgctgggaggtgtagtccatctcttgggagatgaagcccgcggcctccccctgtcttcctggttaggctcttgggttttggggcagggctgggctgcctactgcgaggtggcctcgtgcagcgtagtgagatgcctcctctatccacgggccctgggtttgtcactgtccctgggcgccaaacataatctgagctgtaccccttgagttaggagatggaggctggaagagaaaaaagtagcccctggacgaagaggggcctcttgggactctccccaaagtcctagtgcccagtgagtggttcgctaaatgacagaggggaaggattggtgacggatattagaagacgaatcctcatctcatgctagtcgctaaaagaggcaggcagagaagactgcagtaaatgaggcaggagaatagggtctggaggcagggaacctatggctgtttcacgtgacttcttagaactaaattgaaaggaaaaccccaactttccacgcctaagtaacaaaagaaccagaggctgttcccttggaccttttctgcatggcagatgggaaattggctgtctgcaacaaatcacactgagcgccttccagtctttgtttgcaactttgtaacttcactccagcctctgaacggttgctgtccacaaccaatcagactgatggcgggagagtcttcctttgcatagaagtataattttgttaacttcaccctggcctctgattggttgctttctgcaaccactcagactgattgtgggctaccacttcagttacatcaagagagcataaagtggccaatgggaaacttctagagggtatttggaccccagaagattctgtgtctgggcccttgagctgctgcgtgggttcgcttccccactatggagtgtacttttgttttcaataaatccctgtcttcgttcttttgttgttccattatttgctttgcctgtaatcccagtactttgggaggccgaggcaggtggatcacttgagtccaggagtttgagaccagtcaggccaacaaggcaaaaccccgtcactactaaaaatataaaaattagctgggcgtgtgggtgcacttgtgtaatcctaacaacctgggcaactgagacatgagaataaagaatcgcttgaaccgaggaggcagaggctgtagtaagccaagattgcaccactgcactccagtctgggtaacagagtgagactctgtctcaaaaacaaacaactgaggacacatctgtcaaacccagcctcacctgcatgcatttaaaaaaaccaaaaatcaatatgcccttccttatattggttttattttttcttattatcccaggacatgcccatttaacccaaaattgagcttttctgaatagaaaatgaagtatggaaggccggttgcagtggctcacacctgtaatcccagcactttgggaggctgaggcaggcgggtcaccagatcaggagatcgagatcatcctggccaacatggtgaaaccccgtctctactaaaaatacaaaaattagctgggcatggtggcgggcgcttgtaatcccagctacttggcaggctgaggtagaagaatcgctggaacctgggaggcggaggttgcagtaagccaagatcgtgccactgcactccagcctggtgacagagcgagactccgtctcaaaaaaaaaaaaaaaaaaaagaaaaaagaaaatgaagtatgggtagtgaaatagatttactctgcccttcagttttgagccagatacacatgaaggttgtttctattttgatcccattgtgtgatagcctctatgattagcctccctgttgtggtttaatatttcagagttctcccaaagcatgtggttggaacctgattatgacctttagggattccaagactaaaaagattatagtgtgtacccttccaaatgtaattcaaaatatatgcaattctaaatcacaaaataagtgtaagaaagtacaagaaagttctaactaattttcccaagatgtctcattttgaaattcttaaatttttttttctttttttgtcctccagctttgctatgccctaagcagaaaatcagtctgcacttgcccctctcaggacaaactgcttgtctaaccttctattaaaaaaaaaaaaaaaaaaaaaaaaagcagttgatatttgtgggggaggggcaagacctgacctcaccattctttttttttttttttgagacagagtctcactctgtcacccaggctggagtgcagtggcaagatctcagctcactgcaacctctccctcctaggttcaagcaattctccttcctcagccccccaagtacctgggactacaggcacacgccaccatgcccggctaacttttttttttgcatttttagtagagacggggtttcgccatgatggccaggctggtcttgaactcctgacctcaggtgatgcacccgcctcagcctcccaaaatgctgggattataggcgtgagccaccatgcccagctggacctcaccattcttaatgttctttttccttggaggaaaaactaaagtggtgatctttaagctggttctgcactgtggaagtagtgcattacaaagattaataaagcctctctacccacagaagggggaaaggatttgcatacaatcttagaaaagcaaatgtaaatggcttttagatgtgaaaagatgcccaactttctttctttctatttatttatttatttatttattgagacggagtctcactcttgttgcccaggctagagtgcaatggagagatctcggctcactgcaacctctgcctcctgggatcaagcaattctcctgcctcagcctcccgagtagctgggactataggcgtgtgccacaacgccagggtaatttttgtactttttagtagagacggggtttcaccatgttggcacaatggtctcaatctcttgacctcgtgatcccacccgcctcggcctcccaaagtgctgggattacaggcgtgaaccactgtgcccggccccaacctttctaataggaaaaatatatatacaagtttaaaccggtataaaaccatattttaatctattcaattgtcaaaaatccaaaagtttgaaaatgttctagtgactccccatttctttcagggttaagccaagctccttgtcctggcctacaaggcactaagggtctggtggtcccctgtctaactctgccttcatttgctactctctcctttctcaccctaccgtagtcatacttgtgattccttttggctacctttttttcctttaattttgaaaaatgcaaactcaattttttatgtagttgttaaccccaatgtttaaaaaaagtaaagcatttcatccaaattactaactaaaagataatagctaagaatacctgaaccagatatcaaagaattgggggtaatgggggccgggcatggtggctcatgcctgtaatcccagcactttgggaggctgaggtggacagatcacttgaggccaggagttcgaggccagcctggccaaaatggcaaaaccccgtctctactaaaaatacaaaaattagctgggcgtgatgatgctcgcctgtagtcccagctacttgggaggctgaggcaggaggagaatcacttgaaccggggaggcagaggctgcagtaagccgagattgcgccactgcactctagcctgggcaacagagcgagactctgtctcaaaaaaaaaaaaaaaaatgcaattaaccattagatacttccattcttcacctgccagtttttccatttcctttcttctttcccatatcacctccaagatgtccctccattgccctagatagctcagctctggctctctgtgtatattcttcaaccaaacaagagcctgagaatcagattgatggtgactatttctaattagtccaaattagtccagtgtgcctcttgggggcctcccacaattccacatgcagcttataaaagtggttgcccaacacaaactaatctcttttcccagaaaatttctgcttgtaagaaatttttctccatttatgcttaaagcagacagtgggtactcaacaaataatagttcctatcctagagccatttgaggatctgacatcggttataggagagggaattatgaaaatggaaaaaagggagaaggagtggaaaacttggatatattgggataaatttaccattacaccaattcagaagtttttttcttgcttggaggttttttctttttcttttttttcagacggagtctcgcactgttgcccgggctggagtgtagtggtgtgatctcggctcactgcaacctccacctcctgggttcaagtgattcttctgcctcagcctcctgagtaggtgagactacaggcacatgacaccatgcccgggtatttgcatttttagtagagacagggtttcactatgttggtcaggttggtctcaaactcctgacctcatgatctgcctgcctcagcctctcaaagtgctgggattataggcatgagccaccgcacccggccgcttggaggtttttaagggaaaggaaaaggaagaagacagggccaaaaaggatttcacaaaaatacatcattaaatatgaaactataagaatggattgttggccaggcatggtagctcacgtctgtaatcccagcacttgggaggccaaggtgggcagattacttaaactcaggagtttgagactatcctcggcaacatggcaaaactccatctttaccaaaaatacaaaaaattagctgggcatggtggcgcacacctgtagtcccagctacttgggaggctcagtggggaggatcacttaagcccaggaggccgaggttgcagtgagccatcatcgtgccactgcactccagcctgggtgaatgagtgagacactatctcaaaaaaaaaaaaaaagttactttattcttaatattgttggcaattaagcagacatactaacattgtaacattaacatttatttagaatctcttttgaagctgtccttgacctgtttctcaagactggaattctgctgggtgccgtggtgcatgcttgtaatcccagcactttgggaggctgacacaggaggatgacttgaggccatgagttcaagactagcttgccgcacaacatagcaagattctgtctctacaaaaataaaaaaaaaattagcttattcatctctagctgtcagtccctggtgtgagtccagtacaagggggaggaagaggaattaacaatcactaaatatgtactctgtgctcaatctgtgtaatacctcttacatacactctttcatttactccttccaacaagcctttagttagaaaacgctatctccattttttacatgaacctgcagatgagaaattaatttttttttaatgtttccagaaagtcagctataatgctggcatttgatcccagatgtgcacactccaaacttcataatatttccactgtattattttgcctattccaaatatagctctatttgcagagcgaataattgtgctgatatttggtgagatagcatgtgcaatagaaaatccagtttattatttaaatggaggcagaagatgtagatataggcaaatcgtaacatcacctatgttagctcttgtttctgttttgcctttcccatttgacaaagaactgtttgtagcagttaagggctattttattttctgagatggagagaacagcatgaagggcataccattagtaggtacggttgtgtgtacctgtagttccagctacttagtaggctgaggcaggaagccaggactttaaggttagtgagttatgatcatgccactgcactcgaacctgggtgacagagggagaccctaactctaaaagaaataaaacaaacaaaaaaaaagatgtgaactttttttttttttttttgagacagagtcttactctgtcgcccaggctggaatgcagtggtgcgaccttggctcattgcaacctctgcctcctgggttcaagcgattctcctgcctcagcctcccaagtacctgggattacaggtgcctgacaccatgcccggctaatttttgtatttcaagtagagacggggtttcatcatgttggccaggctggtctcgaactcctgacctcaagtgatctgcctgccttggcgccaaagtgctgggattataggcatgaggcaccatgcccggccaaaaactctatagatttttaaattatatctgcaattttaaactaagaactgccctcctctatatcttaaggttttgaaagcaaaagacatgttggaggtaattaaatgggtagaggtggcttcatgctggcattgttttaagtctgaaaaaagtggggctggcatcagtggcctctgtggcttctgaaaggattggtttttacctgatgttgcttgccttgtgtttctaggcagaggacctgcccatgagcttctgcaaccagttcactctctgcttaggttttggttcggccctcgccatctggactagtaacagagtctgggaagcgatgatgcacagcgagggctcagggtcacacagcaggtctctcagatctagcggtaggcaaacacaggttggaggtaaaagcccctgagatctgtggaaatgaatgaaggtctagatagcaaaaagcttacatgcccatagcagcttagattacggtccaactgtctaaaagtttatatatcagtgaattgtttccaattttgatctacaaaacctaccggtttctgagttgccaaacatgtcactcctctgcaataatcacattccaagtagtctttctaaagtcgaatgatctggacctcccaagccatgtctaatgttaacatctaagttcccgtgttggtcctagaagtaactcttacatcattatcttcttttaattaaaaaaaaaaaacttttagtttttaatattttctttcttttctttttctttttctttcttttttttttttttttgagatgaagtctccttctgtcgcccaggctggagtgcagtgatgcgatcttgactcactgcaacctccgcgtcccaggttcaagtgattgtcctgcctcagccttcggagtagctgggattaaaggtgcccaccaccacgcacagctaatttttgtatttttaatagaaatggagtgtcaccatgttggccaggctggtctccaactcctgacctcaagtgatccacccaccttggcctcccaaagtgctgggattacaggtgtgagtcactgtgcctagcagtttttatgttttcttattgcaaaagaaatacatgttcattgtgcagaacatttagacattacatgtaagcacaagaagaaaagtcacccataatcctaacatctagcgataactattgttattttcaatatatatctttctggtcttctttccatacatttatatttacatatatatgcttttattttttgtccaaatggaaccatatgaccgaggaattgcaaatgctggttttatttaatgataccacatcatcatttatctgagtcacttaaaaattattctaggccaggcgcactagctcatgcctgtagttgcagcactttgggaagacgagggaggtggatcatttgagcctaggagttcaaaaccagcctgggcaacatggcaaaaccctatgcctacaaaatatcaaaaaataaaacattagccaggcgtggtggcttatgcctgtagtcccagctacttgggagactgaggtgggaggatcccttcagcctaggaggtggaggttgcaatgaactgagatcatgccactgcattccagcctgggcaacagagtgagatcctgtttctaaataaataaataaataaataaaataaaaattattctataatatgtttcttggctattcaggttgaggatcccgtatccaaaatgtttgggagcagaagtgttttggaaattagaccattttggattttggaagacttgcatatacataatgagatattttggggatgggactgaagtctaaacacaaaattcatttatgtttcatatacaccttatacatatagcctgaaggtaattttatacaatattttaaatagttttgtgcatgaaacaaagttttttgactgtgtgtgtgtgtgtgtgtgtgtgtgtgcacgtgtgtgcgcgtgtgcgtgttttaaacagagtctcactctgtcacccagagtgacagatcttggctcactgcaacctccgtctcccgggttcaagcgattctcctgcctcaggctcctgagtagctgggattacaggtgcgcgccactacgcctggctaatttttgtatttttagtagagacagggcttcaccatgttggccaggctggtcttgaattcctgacctcaggtgatccgcctgccttggcctcccaaagtgctaggattacaggcgtgagccaccacaactggcttgattgtgttttgtcttatgaggtaggtcaggtatggaattttcccattgtggtgtcacgttaacactcaagaagtttcgggttggagaacatttcagattttggatttttttgattagggatgctcaacctgtatataattctacaatatgaatatgctataatttctttaattatctattgtttccaatctagattatttcccacttttgttattctaaataacaataaatggacattcctgtaactatttctgcttattttcatagattaaattcctaaacaagaattgataagtcaggctgggcacggtggcttacgcctgtaatcccaggactttgggaggctgaggcgggcagatcacaaggtcaggagttcgagaccagcctgaccaacatggtgaaaccccgcctctactaaaaatacaaaaaatagccggacatggtgcctgtaatcccagctactcaggaggcggaggcaggagaatttctttttctttttcttttttttttttttgagacgaagtctcactctgtcactcagccaggctggagtacagtggcgcaatctcggctcactgcaacctctgcctcccgggttcaagcaattctccttgaatcacacctggctaatttttgtatttttaatagagacggggttgcaccgtattggtcaggttggtctcaaactcctgacctcaggtaatccacccacctgggcctcccaaactgctgggattacaggcatgagccattgtgcccggcccaaagtttattaattggtaatctttgccatttcgacagaaaaacgcatactgtcatctcatcatgatttattttgtaaacctctgattactagtaatatcaaatatctttcatctatttattggcgatttgtaattattctatgaacctcttattcatattgtttgccagttttcttttgagggtttctaatttgatttaagggtgttaaccctttatcatgttgcaaatatttcccttcatattattgtttgcatttcacttttaactatttctctctttttcaaagttggtttttaaatttttatgtagacaaatctaccattcttttattttatggatatgcctttagtatcatacttagaaaaggttctcttttttattttattttattaattaatttatttttttgagacagagtcttgctctgttgctcaggctggagtgcaatgtcacgttcttggctcactgcaacctctgcctcccaggttcaagcaattctcgtgtctcagcctcctgagtagctgggattacaggtgtgtgccaatatgcccagctaatttttgtatttttagtagagacggggtttcgccatgttggccaggctggtcttgaactcctggcctcaggtgatctaccctctcagccttccaaagtgctgggagtacaggcatgagccactgtgccgggccaggttctcttttttatgtataattctccaaggtctcaaaaacgctcaagacctcttcataatttggagctttatatttattaagcagtgttttgcctttaaattcatcttgtttgcttgcaaaatgtaacatttcactagtttgtagtttccttcacttcctgcattgaggtctgtctacatgtttcacagaacatttatttatttatttatttatttagttagttagttattactttttgagatgaaggctcgccctgtcgcatctcggctcactgcaacctccgcctcccaggttcatgtgattctcctgcttctgcctcccgagtagctgggactacaggcatgcgccatcacacctggctaattttgtatttttagtagagacgggatttcaccatgttagccaggctggtcttgaacttctgacctaaggtgatccacctgcctcggcctcccaaagtgctgggattacaagcgtgagccacgcacccggccatggtccacagaacatgaaatgtcaatcacatatggttcattctaatctatatgcacataattatatatattttctagatttttcatatagataacttttgaatggaaaaggaagtttcatcccccatttagattagaaaataatttctttttatttgaacagaatcagccatatagaatcctatcccttggaataatccacatggcttctttcttactttcttttcttttcttctttctttccttccttccttccttttctttctttttttttttgttttttgatggagtcttactctgtcacccaggctggagtgcagtggtgcaatctcggctcactgaagccttgacctcctgggctcaaacgatgttcccacctcggcctcctgagtagctagaaccacaggcgcacaccaccatacccactaatttttttttttttttttttttttaaatagaggccaggtgcggtggctcatgcctgtaatcctggcactttgggaggctgaggtgggtggatcacctgaggtatggagttcgagaacagcctggccagcatggtgaaacccgtctctactaaaaatacaaaaattagccaggcgtggtggcgggcacctgtaatcccagctacttgggagaccgaggcacgagaatcgcttgaaaccaggaggcggaggctgcagtgagctgagatcacaccactgcattccaccctgggcgaccgagcaagactccatctcaaaatatatatatatatatacacacacacacacacatacaaacatatggagagatgaggtctcactgtgttgcccaggctggtcttgaactcctgggctcaagtaatcctcccacctcggcctccctaagtgctggaattacaggtgtgagccattgcacccagcctcctttctttggcttctgatatctgtgaggaagtgggagaccttagagaaaagtggcatgatctttcttaaataagctttagctcctagctgtttcaccagttatgtttttattttataagtaatgaattactaggattttgattagattctgcaagtaataattttggattgtaagacagcatcatatggcattttctaatggtaggactacttcttagtgggaataaagaatgcctgttttggctgggcgtggtgactcatgcctgtaatcccagccctttgggaggccgaggtgggtggatcacctgaggccaagagtttgagaccagcctgaccaacatggtgaaaccccgtctctactaaaaatacaaaaattagcagggcgtggtggtgcgtgcctgtaatcccagctactcgggaggctgaggcaggagaatcacttgaacccgggaggtggaggttgcagtgacccattatcaggccactgcactccagactgtgcgacagtgcaagactccatctcgaaagaaaaaaaaaaaaaaaaaaagaatgcctgtttctcagaataggagatttgaaagaaaaacattaaagaaaaaaaattaaagaaaaatgtgactataaaacatctctattaccaagtcctacctaagttacaggacaacggcttatagaaaatagtactgcagtcatctctgtggtacttatgaggaatcatcataatttactaagatagtatttctaggtaatgtcttatttgctgacagacaaggctcaggaactgtctctgagactcatcaaagctagcttccagacaaatagggtgatgtcctttcctaaaggggaaactggactgggatgggactgtcattcagctgaaatcaccaacaggattcctgctacaaaaaccaggttttctagagctcagggtctcagctctgctataaagccttcccacactggctgcctcggataccttccaaaatatgggtacaccccaaattcaaggactgttatcacttaccgtcctctatccagtcagtacccatcctcctgagctcattgtgatccatgtacttcgataaaaggcctaaaggcaggataaagtcagtgagtctgtgatctggcttttgctcttggaaatgaatatctaaaagtttttatcattaagacatctaagcagccggcagaatcggccttctgataattaggcagattccaaaaactgggcttccaggtgcctggtagttacctataggtaacagggccccttcttccaaggtcatcttcataaagaatggggatacttggccgggtgcagtgactcacagccgggtacagtgactaatgcctgtaatcccagcactttgggaggctgaggcaggaagactgcttgagcccaggagtttaagaccaccctgggcaatatagcaagaccttgtctcttaaaaaaaaaaaaattggctgggcatggtggcacatgcctatagtcccagatactcaagaggctgagggaggtaggaggattgcttgagcccaggatgttgaggctgcagcaagccatggtggtgccactgtgcttcaacttgggcaacgaagtgagaccttgtctcaaatcaccacccccgcctacacacataaaacccccacaccatacatacataaaaatggggatactgactgggcgcggtggcttacgcttgtaatcccagcaattttggtggctgaggtgggtggatcacctgaggtcaggagttcaagactagcctggccgacatggtgaaaccccatcattactaaaaatacaaaaattaggccaggcgcgatggctcacgcctgtaatcccagcactttgggaggccgaggcgggcggatcacctgaggtcaggagttcaagaccagcctggccaacatggtgaaaccccatctctactaaaaaatataaaaattagcagggtgtggtggcaggcgacttaatcccagccacttgggaggcagaggcaggagaatctcaacccgggaggcagaggttgcagtgagctgagatcaagccattgcattcaaatctgggggacaagagcgagacttctctcaaaaaaaaaaaaaaaaagaaaaattagccaggtgtggtggcaggcacctgtaatcccagctactcaggaggctgaggcaggacaatcacttgaacccagaaggtggaggtggcagtgagctgagatcgtgccactgcactccagcctgggcagcaagagtgaaactcagtttcaaaaacaaaacaaaacaaaacaaaacaaaacaaagacagagggccaggcaccgtggctcacgcctgtaatcccagcactttgggaggccgaggcgggcagatcacgaggtcaggaaatcgagaccatcctggctaacacggtgaaaccctgtctctactaaaaatacaaaaaaatttagccgggcgtgatggtgagcgcctgtagtcccagctactcgggaggctgaggcaggaaaatggcatgaacccgggaggtggagcttgcagtgagccgagatggcgccactgtactccagcctgggtgacacagcgagactccgtctcaaaaaagaaaaaaagaagggatgcttgacaacataatttgggaaagtacaggacaaaagtgactgtaggaatgaaaggactttctttgtacctacaaacaagactgctgatcttctgatgggaagttttgggttcttggagtacatcagtgtttgttctaggatgttaattttccccttgcactttttttcctaagtgtggaaaaaagtaagtataaagcagtgaagcagcagcactctattgatcagccttaccacagtttctggggtcagagactctatcagagagagtacagtagtgtttgaaataactacagttgctgaatgagtattataccagaataacaagcccctagaccaagttattctaaatcctgtgaatgccccttgcttgtacccactcatgccatatattgtgcctgtaatgtttctaaagccatcttggcttctctgtatctaagtctttgttctttaagttccaccttgagttctgcctccctatgagcttgtccttgactgcttgcctgcctgacctaaccctgctctgagcattttgcaggtactcctctcccggcacgcacttttttacatcgaggttttatctcctttgctagcttgcaggctcccctcaggaagtttgtttttgtttttgttttttcagaaggagccttgctctgtcgcccaggctggagtgcagtggcgcggtcttggctcactgcaaccctcacctcctgggttcaagcaattctcctgcctcagcctcccaagtagctgggactataggttcctgcccccaagcccagctaattttttttttgtatttttggtagagacggggtttcaccatattggccaggctggtctcgaactcctgaccttgtgatccacccgcctcggcctcccaaagtgctaggattacaggcgtgagccaccacgcccagccccctcaggaagttttaatccttgggttctctatggcctgttatggcttttgggtgaaggaaggcacctctcagtggatcttttataaggataggcacctcaagaataggagggggaggctgggcatggtggctcatgcttgtaatcccaacactttgggaggttgagctgagtggatcacctgaggtcaggagttccagaacagcctggccaacatggcaaaaccccagctctgctaaaaaatacaaaacttagccagacatggtggtgtaagcctgtaatcccagctacttgggaggctgaggcctgggcaactgagactctgtctcaaaaaaaaaaaaaaaaggagggggaaaataggaatttattttgatagaacttatggcttaattaacatggacaacttgtagttgacagcaccaaatttccttctgtaaatactgtcatcagtgtatcagctataggtttgggtgcagatcagacagataatccctaatggaaaccccgacacaagggcactgcaagtccgatcacagaaagcttctgtgggtcctaaagaggtgatacatatggaagactcctgggaatagtcagtcctagggtctgctaggtggttctagggtcagcttctagaaaaccatggatgggcttcctgaggcagcccaggctcaagcttgaccctgagatcagacacagtagcctctgtggagttcgtgaagagaaatgataccacctgggtcctggcagaaccagtggcatgctgccatcatgctgcatggccacacagcatggcagcccttgcttgggactccctggacatgctctgatggacagtaaaacaatccgttctagtcaaggaaaggattcaagatagttataaaagcaatatataactccatttcaattcagtccataagtaactttttcagcatcaacctgaccttgtagcctctgacccatgttagaagggctcctaagagtccaccagtcttttcatgactaagagtggcaatcgaaactaactttgtgactcagttgggagggaactatagaaacataaatccacaataaaaaacaggtcatagatatcaactgctgatgtgaaaagaaatgggaaatgtttcttgcatgccatgttctgtcattaaatagtgtgtcagaagaaaataggtctctcagtatgttgaagagttaacaaagccattattgctcacatacaaagaatctgcagattgttcctgcttcagtaggtttgatgtgccagggatctttggagtacacttcttggggcagcttccacttcaggaactgggcacatatagttaggacttgcctgctctcctgtgaaaaagatgaccatagatcagcattttcaaacatttttatttttttgagctggaatctcatgctgtcgctcaggctggactacagcagtgccatcttggctcactgcgacctccacctcccgggttcaagcaattctcttccctcagcctcctgagtagctgggattataggcgcccaccaccatgcccggttaatttttgtatttttagtagagacagggttttgccatgttggccaggctggtcttgaactcctggcctcgggtgatccatccaccctggcctcccaaagtgctgggattacaggcgtgaaccaccgtgcccagcctcatttttaaacagaggtaatctttcttcaataaaactagtactaaagtacaatatgaaaaactgataaaagagagcagaagagcggaaaggaactagaatcctgccctcctcctccaacttctccaaatagtccttacgtggaatccacaaaaaccctagggttctggggaggatgtagaaaccactggtgttgggcaaaagtgacagcttgcagatgtaatccctagaccagaggtttgggcaggaattcccattaccctgtgccctagagatgaagctcccacctccacttactgttcctatgccatttttctgtcactctacaaaggaagtgtagcccctgacttctgtccttgtggcatctctgggttggaaggaaggaactctagaggactgatctcttcctgatccacatccttgagcaaaatttagcaagtgggtctcttttctagttcattgttctcagaatgccacccatacaccatgcaacacctctgatgaatctccaagccagtattttatctcaggtccactagatgtttgggccataaaaattcctttggctactgatgggcatataaattacttcagccactgtgtttagtgatttataaatatctaataaaaagttaaagatacctagatattctacttgaggttttatgccctcaagaaactctcatatgcgtgcacaaggaaacaggtaaaataattgcagaactgtaatcacgaaaaattgaaatgtcaggccaggcacagtggctcatgcctgtaatcccagctctctgggaggccaagcaggtagatgatttgaggtcaggagttcgagaccagcctggccaacatggcaaaaccccatctctactaaaaatacaaaaattagccaggcatggtagtgggcagttgtaatcccagctactcaggaggctgaggcagaagagttgcttgaacccaggaggtggaggttgcagtgatccgagatcacaccactgcactccagcctgggcgacagagaccctgtctcaaaaatatatatgtatatctatctgtctgtctgtctgtctgtctgtctatgtatgtatgtaggtatgaatgtatgtatgtatgtatgtatctatctatatgagtatatgaatgcttcttttctttgcagagttggctctggatttgaagtttgagggatgagagacaccgacagtaggccttacctcagctactgcatcattttcatcctgagaatacagaagtagtgggaccaagctgtccaggacttggttctctatactcttcttatctgggttttttacagactttatggcggctccaaagagagtcacggagaaacgatgaacatcagatctcacctgggaagggagtagccaaagggaagcaattcactgaacgtgtgcgtgcttagcttgtaacaacctgggaggggttgaaaagccagtcctgacaatgaggctatttagctgtatgtagctgaaggcaagaaataaaatatacgtggacacaggccaggcgcagtggctcacgcctgtaatcccagcactttaggaggctgaggcaggcagatcacttgaggtcaggagttcaagaccagcctggccaatatggggaaaccccatctccactaaaaatacaaaaattagctgggcgtggtggcgcatgcctgtagtcccagctactcgggaggctgaggcaggagaatcgcttgaacccaggaggtggaggttgcagtaggccaagatcatgccactgcactccagcctgggtgacagagcaagactccgtctccctccccctctctctctatatatggacacagtaagacttgctgctttggcactacttgttttctcaccctacaagtgagagatgcacatagtctcacctgtagtcggcaaacctcgtgcctggtacaggcaggaaccattcacacaggctgctttgttgaaattcgaaatcccagccttggtatgttttactcttccaaggatgctggtcattgtgctctatgcatttcctcttgagaaatatatggcatttgggacagggacataagtatcatccaccatcttgacccagttctgatagttcttgaagggaaagacaatgttttccccttccccatcacaaagcagggtagtaccttagcaagtttctatgttcagttgttttttttttttttggttaaacctgaaaaacaataacatctgccctatcaacatcacaggttacctagtagggtcttaagagaggaggtttgaaatgctctgaaagtaaaagtcctataccaagtagagtgtatttattactataccaacttctgtttgctgttatgcccattaccctcctcctaggaaagtctgtcctctctgattgtcttacatcaccaaataaggagaacagggtcctcatcatggcagccagggtagtgaaatccattgttctaacaagttgcaggagtatctggatggctgacagaacgatcttctcatcggtttcacgcaagctgtctacaatgtatggcaacaggctcttgatgtcttctctctgcatggccaaagggagcatatcaccttttctccaaatcgcacgtcacctggtaccaaagggggtgctccccatctttactcagtacctagtgctcactgatttttgttaggggtggtagatccagaagggagaagaaggggatatgatggccttctctcagtactggaggtctgatacatagaagaggggcagagctgctttgagttgcctcaagggcaaaagtgggaccaggcagggaaggtctagggctatgggcttgggctcactgtaaggaagagctctgctaacaagggaaagtggaacaggtagctcaggccacggtgagctcccaaacacacaagatatccaaacagaggctcaaagatcctgatatggtttggctctgtgtccccacctaaatctcatctcgaactgtaattcccacttgtagagggagagacttggtgggaagtgattggatcatgagggctgtttcccccatgctgttctcatgatagtgagggagttctcaggagatctgatggttttaaaatggcagttttggctgggtgcagtggctcatgcctgtaatcccagcactttgggaggccgaggcaggtgaattactcgaggtcaggagttcgagaccagcctggccaatacagcgaaaccccacctctactaaaaatacaaaaattaggctgggcacagtggctcacgcccgtaatcccagcactttaggaggccgaggtgggcggatcacctgcagtcaggagttcgagcccaacctgaccaacatggcaaaaccctgtctctactaaaaatacaaaaattcgccaggcatggtggcacatacctgtaatcccagctacctgggaggctgaggcagaatagcttgaaccagggaggtggaggttgtagtgagccgagatcgcaccattgtactccagcctgggttacaagaacaaaactctgtctcaaaaaaaaaaaaaaaaaaaaaaagcctggtgtggtggtgcctgcctgtagtcccagctactcaggaggctgaggcaggagaattgctatagcttgaactcaaatggcagaggttgcagtgagctgagatcacaccactgcactccaccctaggtgacacagagagactcaatctcaaaaaaaataaaaataaaaaataaaataaaagtggcagtttcccctgctttctgtctctctcctgctccgccattgtgaagatgtacctgcttcccctttgccttccaccatgattgtaagtttcctgaggcctccctagccatgcagaattgtgagtctagtaaacctccttcgtttataaattacccagctcagggagtatctttatagcagtgtgaaaatggatcccctggcaggaattcaagcagaatttgaccgaggacttaagggttcttctcattctgaatggggattctgctcttctgaaactactgaaaggaaacaatctcagggttgtaaagtttaaacgtacacatgaaaaagtaagtagaatataaacacaagttaggaagccagttttaaaaaaaagaaaaagtaagtagaataaagcgatattaatgtatccaatcaaccagaattaacatacactgacattcgtcatttttgcttcagaaacacttttttcttttttttttttttgagacagtatgtcgctctgtcattcaggctggagtgcagtggcgcaatctcggctcactacaacctctgcctcacgggtttaagcaattctcctgcctcagcctcccaagtagctgggactacaggcacatgctaccatggctaatttttgcatttttagtagagatggggtttcactatgttggccaggttggtctcaaactcctgacttcatgtgatctgctcgccttggcctcccgaagtgctggggttacaggcgctagccactgcgcctggccccaaatatttttaaataaaatatttggtgaagcggctcatgcctgtaatcccagctactctgcaggctgaggtaagaggactgcttaaggccaggagttcaaggctgcagtgagccatgatcatgccactgttctctagcctgggcaacagagcaagaccctgtctctaaaaaaatttaaaaagtaaaaataggccaggtgtggtggctcacgcctgtaatcccagcactttgggaggccgaggcgggcggatcatgaggtcaggagatcgagaccatcctagctaacacatgaaaccctgtctctactaaaaatacaaaaaattaggcaggggaatggcatgaacccgggaggcggaggttgcagtgagccgagattgtgccactgcacttcagcctgggtgacagagcaagactctgtctcaaaaaaaaaaaaaaaaagtaaaaataaataaataaataaaatagaactccaagccacctgtggtggctcacacctgtaatcccagcattttggaagggtgaggcagccagatcgcttgaggtcaggagttcgagaccagcctggccaacatggtgaaaccctgtccctactaaaacatacaaaaattagccaggtgtagtggcagatgcctgtagtcccaggtatttggaaagctgggacttggagacttggagaatcacttgaagccgggaggcagaggttgcggcgagccgagattgtgccactgcactctagcctgggtgacaaagagagtccctgtctcaaaaaaaaaaaaaaaaagaatagaactccagtgacaaaactgaagcttcagaaattcctcatgtcttctggcttaggcttagttttctcaccaggcctatggaagatgagctttcttccaacatgaatgtcagtgatcttttttttagatgacaagcatcttgggagcatatcaatggtcttttcaatctactccatggggcaacacggtacaaggcataaaacaatacctaaatgctgtccaggttgtgataatgagtatacctcccctgcaaattgcagctatcaactattatgaatatatataatttggactttttatttatttcatttaattccattaactctttttttctctttttttgtgagacagagtttcgcgcttgttgccgaggctggagtgcaatagtgcgatctcggctcactgcaacctccgcttcctgggttcagacgattctcctgcctcagcctcccaagtagctgggattacaggcatgtgccaccacacctggctaatttttttgtatttttagtagagacggggtttctccatgttggttaggctagtctcaaactctcgacctcaggtgattcacccgcctcggctcccaaagtgctgggattataagcgtgagccaccgtgcctggcctaactttttttttttttcccgagacggagtcttgctctgttacccaggctagagtgcagtggtgccatcttggctcactgcaacctctgcctcccgggttcatgcgattctcctgcctcagcctactgagtagctgggattacaggcatgtgccatcatgcccagctaatttttatatttttagtagagatggggtttcaccatgttggtccggctggtctcaaactcctgacctcgtgatccactcgcctcggcctcccaaagtgctgtgattacaggcgtgagccatcacgcctggccaatttcattaatttttaaatagtcagtacttgcctatttcttaggcataaaactttaaatgatacaaaaggatgtgcaggaaaaaagaccctctcccacctactcctgtccccaggctacccaattgtcttcagctattttcagtttcttaggtattattttggggtgattaattggtatcttaggaatcagtgatctgggccaggcgctgtggctcacacctgtaatcccagtattttgggaggctgaggtggacagatcacttgagaccaggagttcgagagcagccctggcaacacagtgagactctgtctctacaaaaattttaaaaatcagctgggcatagtggcatgtgcctgtggtccccgctactcaggaggctgaggtgagaggatcacttgagcccgggaggttgaagctgcggcacgcagcgatggtgtcactgaactccagcctgggtcacaaagcaagaccctatcttaaaaaaagaaaaaaaaaaaaagaaagaaagaaggaaggaaggagagaaaagaaaagaaagagaaggaaaggaagaaaggaaggaaagaaagaaaaaggaaagaaagaagggaaagaaagaaaggaaggaagagaaagaaagaaagaaagagagggacagaaagaaagagaaagaaaagaaaagaaaagaaaagaaaagaaaagaatccatggtctgggggcccctcctaccatctcctggtgtccaacaagattgtacagtcccctcaggccgagaattctaaagagatgatttccatcttgtagccagtctttaaagcgggcaacagagtatatgctgggcagtctcttggccactggactccggagaagctgaaagaacccagagatcagcccaaaaaatgacctttaagccctttttcatgtggggagctaccttcccaccaatgctaaagtacatattttccttttaaatctctattacagaacatacaggatgatgtttatttaccctataggtacacaaagaatactgaattatgcatgtgtggaaagaagatttttgagaggcttgaatctgaaaattctttcttttttgtgtgtttgttttgttttgtttttttgagatggagtctcactctgttgcccaggctggagtgcagtggtgcgatcttggctcactgcaatctctgcctcccgggttcaagcgattctcatgcctcatcccgagtagctgagattacaggtgcccgccaccatgcccagctaattattttgtatttttagtagagacggggtttcaccatgttggccaggctagttttgaactcctgaactcaggtgatccgcccgcttcaacctcccaaagtgctgggattacaggcgtgagccaccgcgcctgcccttgaatctgaaaattatttctatctcactcttgaaacagatcccaacatgccactaactcgatgtagcctaggaaggcagggattgctgcttcataggcttcctgaatccagcttctaaacaatgagtcttacctccacaaaaaagcctgcagatgtgagtttatgtttatcattccctcggttaagaagagggactaataagtacatgaccttctgtgcaaggagctgatttctttccagcaatgcgctgcaaaacacaacaccaacagaatgactctcaggaatgctcccatccagagggcattgtctcagggctggggaccctctagaagttcttgcccagctacaggatagtatacggtagggccaggacctctgaaaaatttgcctagcattatggatatttgcccaccctcttataaggaggttattcaaccttagttgctgtgataactagaagggaaataaatactcaaaacaatgccgatttagaacaggtgggtgtatgcatgacaaggaagccttacttggcaaggagaaatagtccctgaagatggccatcttttcctcccaggagagcccatcctttattcttttccatgatgttgaattcctgcaagcagcatgttctgaggaggagagtctttgtagcctgcatggcaaagctaaatcaaacgaaaacagtgtgggtgatttgaacaggtccctccaacttaccagcacacagtcatcccattctcagtgaggagggtcatgcattgacaactgctggactgtaattctctgctttccaaattgcccaaaagactcttctcttttttcttttactttcttcttcttctttttctttcttccttttttttttttttttttttttttgagacggaggcttgctctgttgcccaggccagagtgcagtggtgagatcgtggcttgctgcaacctctgcctccctggttcaagcgattctcctgcctcagcctcctgagtagctgggattacaggtgcacgccaccacacctggctaatttttctatttttagtagagactgggtttcaccatgttggtcaggctggtctcaaactcctgacctcagatgatatgcctgtctcggcctcccaaagtgttggaattacaggcatgagctaccgtgcccggcctactttcaagactagtcaagtgcagtagtgagaccagaagagtcttaatgctctaataacttgtaaggccctttacacaagatctcagcataaagaaatctaactaggtctcatttccccaggagtttagaaggaaatctatgataaaagaaatgatctgggatgctaaacagacacacactgcttttttaaaagctttactgagatacaatttaccccacactatttatctccactgtttttattatttatttatttactgagacaggatcttgttttgtcacccaagctggagggcaagggtgccatcatggctcactgcagccttgagctcctgggctcaagtgatcctcctgcctcagcatccagggcagctgggattacaggcatgtgccatcaggctccaataatttaagaaaaaaaaatttttttctgagacagggtctggctctgtctcccaggctggagtgcggtggcgcgatttctgctcactgcagtctcaatctcctaagctcaagcaatcttcccacctcagcctcccgagtagttgggaccacaagtgtgttccaacacacctggctaatttttatagagacagggtttcaccacgttgcccaggctggtgttgaactcctgagctcaagtagtcctcctgcctcggcctccgaaagtgttggcattacacatgtgggccactgcacccagcctaaaaattttttgtagagacaggctcttgccctattgcctaagctgttcttaaactcctagcttcaaatgatcctcctgccttggcctcccaaagtgctgggattacaggaatgagccattgtgcctggccgtccactgcctttaaaagctacttactgaactgttatcccggacctagcatcagagaatcttaaagctggaaggagcctgagcaacacagtgagaccccttctctacaaaaaataaaaataattagctgggcatggtggcaggcaactgtggttcagctacgcaggaggctgaggtgggaggatcacgtgagcccaggatgttgaggctgcagtgagccatgatcatgccactgcactccagcctgggtgacagatggagaccctgtctcaaaaaataaaacaaaataataaagctggaatggtcctttgagatcaccttgcctgacctttccatttatagataaggaaactgaggcacagaacaatagatttgcccagggtatagaactagttgaatggatgaatgagaactgcactagaactcaggtctactgacttagtctggtgttcttaaatatgtcacattatagtactttctctgaaagaaatccatgtgccatagcaacactaagaaacgtctttattattattattactttttgagacagagtcttgctctgttgcccaggctggagtgcaacggcacgatctcggctcactgcaatctctgcctcccgggctcaagtgattctcgtgcctcagcctcctgagtagctggaattataggcatgtgccaccacgcccagctaatttttgtatttttagtagagacagggtttcacatgttggccaggctggtctcaaactcttgacctcaggtgatccacctgtctcagcctcccaaagtgctgggattacaggcatgagccaccatgcccaaccaacaacactaagaaatttctactgagactctaatgggacttaaaaatatctctccatgcaataaaacagaaagcagaaatcactgcatggtggatcagtacagttttggaggtaggtttaggctgttttgtttctgtctgtacttgatttattaggaaagggctaacacaatatcacatttggctaacccagatataacccagatagccaaatttaccttgttactaataaaaccaaagatagccaatgaaagctcagaatgattcctgggcatttcatcttgatggctcatgagggttgaaggttgtaagctccccttcagttgggactacatcttggctatccctgtgttcaccacagtgcccagtgcttagtacgtgttacttaatgtcaatgaaataatgatgggcagtaccacaaaggggtgacctctgaaggcacttcctgttctgtgtacaggccacttgggatgtcgacatcagacatggtgaggccgatgctgtgatgaatctggataagcagtgtcatgagaagctgaggaaagagtcggaacgtagctgctcgaagcctgtttcccaaaaacacctcataaagggcatctgttgcctgtggtggaaaagacacagagaggaactaagcacctgccattttgaaatacggaagtcatgaaggaaactattaacatatttgactacatacaaatataaagccagggcaacatttatcataaagttagatgacaacaggccaggtgcagtggctcatgtctgcaatcccagcactttgggaggccaaggcgggtggatcaccttaggtcaggagtttgagaccagcttggtcaacagagtgaaaccccatctctactaaaaatacaaaaaaattagccaggtgtggtggctcatgcctgtaatcccagctactcgggaggcagaggcaggagaatcgcttgaaccttagaggtggaggttgcagtgagccgagatcgtgccattgcactccagcttgagtgacagagcgagactctgtctcaaaaaaaaagagttagatggcaacaacctggagaagtatttgtatcaatatattgttcttactatataaaatgctcttacgtagcagtaaaaaaattactcaaagggtaggccacacaccagtagcattgtcatcacctgggagctggttaaacagggagaatttcaagccccatcccaggccttccatatcagaacctgtattttattattattttttattttttgtttttgagacagagtctcgctctgtcacccaggctggagtgcagtggtgagatctctgctcaccgcaagctctgcctcccgggttcacgccattctaccgccttagcctctcgagtagctgggactacaggtgcccgccaccacgcccggctaatttttcatatttttagtagagacggtgtttcaccatgttagccaagatggtctcgatctcctgacctcgtgatccacccgcctcggcctcccaaagtgctgggattacaggtgtgagccactgcgcccagctgagaacctgcattttaataatatcccaaagtgattgtggtttgtgtgcatattaaatctgagaaggactagtgtacagggcatgaacaaacaagtcataaaagaaatacaaacggccaattaaaaacatatacaaggctgggtgtggtggctcacgtccgtaatcagcattttgggaggctaaggcgggaggattgtttgagcccaggagtttgagaccagactgggcaacatggggaatccccgtctctactaaaaaatacaaaaattagccaggcatggtggcactctcctgtattcccagctactcaggaggctgatgtgggaggatcgcttcagcccaggaggaagaggttgcagtgagctgagatcatgccactgcagtccagcctgggcaacagagtgggactctgtctcaaaaagaaaaataacagcctctcgctctccctctccctctccttctccccttccctctccccctcccctttccacggtctcccctctccctctttccacggtctccctctgatgccgagccgaagctggactgtactgctgccatctcggctcactgcaacctccctgcctggttctcctgcctcagcctgccgagtgcctgcgattgcaggcatgcgccgccacgcctgactggttttcgtatttttttggtggagacggggtttcgctgtgttggccgggccggtctccagctcctaaccgcgagtggtccgccagcctcggcctcccgaggtgccgggattgcagatggagtctcgttcactcagtgctcaatggtgcccaggctggagtgcagtggcgtgatctcggctcgctacaacctccacctcccagccgcctgccttggcctcccaaagtgccgagattgcagcctctgcccggccgccaccccgtctgggaagtgaggagcgtctctgcctggccgcccatcgtctgggatgtgaggagcccctctgcctggctgcccagtctggaaggtgaggagcgtctccgcccggccgccatcccatctaggaagtgaggagagcctcttcccggctgccatcacatctaggaagtgaggagcgtctctgcccggccgcccatcgtctgagatgtggggagcgcctctgccctgccgccccgtctgggatgtgaggagcgcctctgcccggccgtgaccccgtctgggaggggaagagcgtctctgcccggcagccccgtctgagaagtgaggagaccctctgcctggcaaccgccccgtctgagaagtgaggagcccctccacccggcagccgccccgtctgagaagtgaggagcctctccgcaaggcagccaccccgtctgggaagtgaggagcgtctccgcccggcagccaccccgtccgggagggaggtgggggggtcagccccacgcccggccaaccgccccgtccgggaggtgaggggcgcctctgcccagccgcccctactgggaagtgaggagcccctctgcccggccagctgccccgtctgggagggaggtgggggggtcagccccccgcccggccagccgccccgtccgggagggaggtgggggggtcagccccccgccggccagccgccccgtccgggagggaggtgggggggtcggccccccgcccggccagccgccccgtccgggagggaggtcggggggtcggccccccgcccggccagccgccccgtctgggaggtgaggggcgcctctgcccggccgcccctactgggaagtgaggagcccctctgcccggccagccgccccctccaggagggaggagggtggtcagccccctgcccggccagctgccccgtccgggaggtggccacccctactgggaagtgaggagcccctctgcccggccaccaccccgtctgggaggtgtacccaacagctcattgagaacgggccaggatgacaatggcggttttgtggaatagaaaggggggaaaggtggggaaaagattgagaaatcggatggttgccgtgtctgtgtagaaagaagtagacatgggagacttttcattttgttctgtactaagaaaaattcttctgccttgggatcctgttgatctgtgaccttacccccaaccctgtgctctctgaaacatgtgcttagtccactcagggttgaatggattaagggcggtgcaagatgtgctttgttaaacagatcctgaaggcagcatgctggttaagagtcatcaccactccctaatctcaagtacccagggacacaaacactgcggaaggccgcagggtcctctccctaggaaaaccagagacctttgttcacttgttaatctgctgaccttccctccactattgtcctatgaccctgccaaatccccctctgcgagaaacatccaagaatgatcaataaaaaataaaaggccgggcgcggtggctcacgcctgtaatcccagcactttgggaggccgagacgggcggatcacgaggtcaggagatcgagaccatcctggctaacacggtgaaaccccgtctctactaaaaatacaaaaattagccgggcatggtggcgcgcgcctgtagtcccagctacacgggaggctgaggcaggagaatggcgtgaacccgggaggcggagcttgcagtgagtcgagatcgcgccactgcactccagcctgggcgacagagcgaaactttgtctcaaaaaaaaaataaaataaaaaaataaaaaaagaaaaaagaaaaataacaataatttagaccacagaaagctgaaccataaactggtaggggagaaaataaagtaaaaagtaaatgttgatagtagggcaggctgtgtgtgtgtggaggcaggtttatgggaacgctgtactttctgctgaatttttctgtgaacttaaaactgctctaaaaaataaagtatttaaaaggaaaaaatgaaaaaagtataccaaatagatataccaaaagtttatatatgtataaagacttctggaaaattcatttttagggagattgttacagacatgagctaagaatggtttttacattttttaataaaaggattgttttaaaaaatccaaaatccaaagattgtttaaaagaaatccaaagaatatgtgacagagactatatatttaccatctggtctcttatagaaagttggccaacttctgctcagggagatctgcactttcttttttttttttttttgagactctctctgtcacccaggctggagtgcagtggcgtgatctcggctcactgcaacctctgcctccctggtttaagtaattctcctgccttagcctcctgagtagctgggattacaggcggccgccaccatgcctggctaatttttgtattttaagtagagacggggttgcatcatgttggccaggctggtctcaaactcctgacctcaagtgattggctcgcctcggcctcccagagtgctggaattacaggcaagagccactgtgcctggcctttttttttttttttttttttgagatggagtctcactctgttgcccaggctggagtgcagtagcgtgatctcggctcactgcaacctctgcctcccgggttcaagcaagtctcctgcctcagcctcttgagtagctgggattacaggtgggcgccactacacctggctaatttttgtattttactagagatggggtttcaccatattggccaggctggtcttgaactcctgacctcaggtgatctacccaccttggcctcccaaagtgctgggattacaggcgtgagccaccgcgtctagtctgcactttgttttatacagttctacgatatttgaggtttttttcccacaagtttgcatttctctttaactatgatgatacatattttttagaggatgagggaaggaatgttttaaacatattaaaccagggatgtttccaagggacagatgacagtcatgggttcttagtttctgtttctggttgggtcaataaagccccttcctcatacctcttttccgcttatcactagagacagaaactaaataccatggcttcaggcttctaaaagcctaaaacaaaacagaacagaacaacaaaaacaaaaaaaggcaggttggacgagtttgtattaaggcattctgactccttcactctccccagctccctccatgtcaatcccttggcagaaacactgtagacttataaatggatgacagatgcaggctttgagagggaccaaaaggaacactctccactggggtgtggggtcagtcatcctgggaggggctgacattagaggggcaaagctcaagggcttacagccacagccacatatgccatcttctcctgtgcaggctcattatggcatttctgcagcttcctcaggagcctccacagaatccaggtcgtgctgggaagctccaccgacagcattctccacacctcagccaggtgcctggaaatcccaaagagcaagaggagaatggctgattccaatgcaatctacaagaggttctcctctctactcagctcttcagggtgtcaaaagactgactttgatttcataacagtaactccccaggtttatttttttcctttttgtgagaccctgtctcaaaaaaaaaaaaaaaaggtggttgtatccatttatttgccaacaagcagagtaggattcctattgctccatattttcttttatttacttatttattttttaaattttattattattattattattttgacacggtgtcttgctctgtcactcaggctggagtcagtggcgtgatcttggctcattgcaacctctgtctcctgggttcaatcaattcccttgcttcagtctcctgagtagctgggattacaggtgcccgccaccacgcccggctaatttttgtatttttagtagagccagggtgtcgccatgttagccaggctggtctcgaactcccgacctcaagtgatctgcccgccctggcctcccaaagtgctgggattacaggcgtgagccactgcacccagccgatttttaaaattttactttaagttccaggatacatgtgcagaatgtgcaggtttgttacataggtatccatgtgccatggtggtttgttgcacctctcaacccgtcatctaggttttaagcccacacgcattaggtatttgtcctattggtctccctccccttgccccccacccctgaagtccccaggttttatcgaatcaagttcccattgcctcagcgtggacttcaaggctattcataacctggtcctgacttaactttttggcctcatctcttccccatcacacactctgtgctcaaaccatccagaccattcagaccattcacctttacctaagaaaacacagactttgaaaaccctatacctttgcttatgtcactgtcctttttttttagacagggtctcactccgtcacccaggctggagtgcagtggtgccatacacagctcactgcagccttgaactcctgagctcaagcaatcctcctgcctcagccacccgaatagctgggaccacaagcatgtgccaccacacctggctaatttttaaatttgtttttgtaaagatggggtctcgccatgttgcccaggctggtcttgaactcctaggctcaagcgatctacccacctcggccttccaaagtgctgggattacaggcatgagccactgtacccgacccttatgtcactttcttaaactggaaggccctttccaaaactcttctctgcccatcaaaatccttcaaggtccagctccagtgtcatgtctcctaggaagccttggttgcttcttcaccatgtctttcgtaagagttctcatagcacttaaaaagtttcttcttcttagaggtcacttcaatcttatgtgtgctatcatcagttctttatgtgtgtatctgttcgctctgaaggaaaggattctttctggctcttcttctaggaattcctcagggacttgcacaatgccaggttcatagaaggttaaattatagacacatatattcgatgtggtctgtggtcctcaaattttggctaaagttaatccttgaaataaagctttgatcctgcctagaagagatatcttctaaagaaaaataatatgtaataacttctctgtcattgattcaaatgtagggcctgagagttacataaacattgtgggagaacattacagtgggaagaaaattgggagttactcatgcttttaatccattcttttattttcagaatccatttaggcatcttggtatgctagagtaagtttttaaagtgtgatcttccaggccagacgtggtggcctataatcctgtaatcccagcactttgtaatcctaacactctgtaattccagcaactgcaatcccagtagcttgtaatcgcagcacctgtaatcccagcactttggaaggctgagatgggaggactgcttgagcccaggagttcaagaccagcctgggaaacatggcaaaaccctgtctctacaaaaaatgcaaaattagccaggtgttgtggtgtgtgcctgtagtcccagctactcaggaggctgaggtgggaggatcatttgaacccagaaggcagagactgaggtgagccaaaatcataccactgcactccagcctgggtggcagggtgagactgtctcggggggaaaaaaaaggaaaaaagaaaagaaaagaaaaaaaagaaaaaaagtgtggtctttcaactgtgagactcatcctaaaacttgagaggcttaaagactatcccaacatttcactcctcacctcagtgattctaatttgtgaataaaacaaagtaagaaggtcctaaagaactcctaaagaaaaggccagaaaggcaatataggatgctgaaaaaactcacagctgcagaatgatgagacggcagaataggaacattcatctgggatgacataaagaaattctcatatttacttaccctcggttattttctttggattcctgagggagtaaatgaagtactttgagaagctgtttattgtgagagaagtgttgcaaaatgcttttagtttgccacacattttaagtgtgctgaaaatgcatctgaatttagaaagcgcacagcctttaagccaatggttcatgaatttcagtgtgagaaacatctggagagtttgtttaaaatatggaaaaaatcttcccacctccagtgattctgattctgtctgtagttgtgacatgggttttgtttgcccatcatccctttgggaaaccaccttttcaagatccttaacaatcctatttggttcgtgtagtttggtgggagctgactccaagccaggctaatcagagtcctgcccaggactaaaaagcttaaaaggaaatgacacaccctttccactgcagttttgagctgatagtaaccatctttgccacctttagtgcaagtccatctgagagatgaatggagccctgatgaaataaactgagtctcgggattcaatcctgacgacagacccttggactttgctgtaatataagcctatacaatttcttaaggtagtgtgagctcagtttctgctacttccaaccaagagtcctgactaatatagtatgtgtgatgtagggtcttggaaaatgcttttcttctttgagacagggttttactctgatgctcaggctggagtgcagtggtgtgatcacagctcactgcagtctcaatttcctgggctcaggtaaattctcccacctcagcctcctgagtatttggaactataggcgtgtgccaccacaactggcaaattttgcactttctgtagagacagggtttcaccatattgctcaggctggtcttgaactattgggctcaagccatccacccgtctcaacctcctaaagtgctaggattacaggtatgagccaccacacctagccagaagatacattttttttttaacaagcatcataggggattctgaggcagtgtttcagacactttaacaaacactgcactaggagactgaagaagcctacatctttaagaacaaatatcttgctgtagcatccttacagaatagaaagagaaacagcctcttgtcttttctggtggagtactgggacagagcactgcaccagggtagtatgagggacacatgtcacatatgtactctatgacttctttggtcctgcattagtgaactgagtttcttaaagtatttcatgtcccatagagaaacagtcagtggtgaaaatgtagtgtaattcctgtgtcagtaaatgataccaccattaacttggcctccaaagccaaaaactgaggagtggggagttagcctgaatgccttcttcctccctgccattcctttctgattcaatcaaggtctgcctacagatgctcctatttctttttttctttttctttttttgaaatggagttttgctctgttgcccaggctggagtgaagtcgtgtgatcctggctcactgttcaagccaattctcctgcctcagcctgcagagtggctgggattacaggcacatgccaccaagcccggctaatttttgtatttttaggagagatggggttcgccatgttggccagaatggtctcgaactcctgacctcaggcgatccacctgccttggcctcccaaagtcctaggattacaggcgtgagccaccgtgtctggccaatgctcctgtttctttactccctcctcctctccatctctgaagccactgccctaatcagggcatcatcatcttttgcctggaaaaggtgcaactgcttaactgcctgtctctcttcctgtttggtagaacagcctctaatccatttccatcagagtcacactaaaaatctgcatctgatgatgtaagtcccttaactaaagttcttcagtggcttcccaactcctgtagtataaagtccactattgtagttcttagttggtcccaatctatcgctgctaacttctgaccactttttaaaagcagctttagtagctgggcgtggtagcttacgcctgaaatcccagcactttgggaggccaaagcgggcggatcatgaggtcaggagattgagaccatcctggccaacatgcttcagctctagccatcacatcactttccaggtggcaggaagaagaaagatgatgagcctactctctccctttaaggttatttgccataggttgcatgtactacttcaatttgcatccagaatttagacaaatagtcacacctatatgcaaaaagtctaggaaataagagtatttcaaatacccaactaaagttcagggattatattactatagaaaatgaaaaaataattagtgaatactgtcttaagtatacaactcactgacttttagtaaatttacaaagttgtgcaaccatgacgacgatccaattttagaacatttccatcactgcaaaaagatccctggtatctgagcccttcttactatctactttcctctccagccactttgatctgcatctggctcttagcattcatcagcttgggggcagctctgctttcagaaatcacttcctgacccttcatttaattaagtcctgacctaggggcttccacagaactccctacttagctttagaatacttatgcatctatggggctaccagactgtgctgcttaagggcggggtgcatgtcctgtccattacttatgggtcctaatagcaccttgcacatagttgatgctttaggcagcctcctaagaacaaccactccaatctatatgtaaacccactaacgtgtggagtcctaattaggggaaggaagccaggctggcgggagcaagggaaagcaaaaagaaaaagcagataagctgtaagtctgcctttcttcatggtccaggacacggcccttctgtgcaatcaactccccatcttcctgtgcccaactatcaccagacacctgcaaattagctcattgcaacttggcattatctatactgcacaaggccctcttcaacacgcagcatgaacactatgctgtaaaatcttcaacaagtctttgtctcctggcagtccgcttctcttttgcaggctgtctgttgtctctctggcgccattattttcctactttctctaataaatctgccttcctctacccacaactgtcttggtaaattcttttaccccagcgccaccagcccagtccttgctcccctgtgacataatgaacttcaggtaaatgacaaaaatataatcagaataacatttcctggccgggcgcggtggctcatgcctgtaatcccagcactttgggaggctgaggcgggcagatcacgaggtcaggagattgagaccacggtgaaaccccctctctactaaaaatactgtaatcccagcactctgggaggccgaggcgggcggatcacgaggtcaggagattgagaccacggtgaaaccccatctctactaaaaatacaaaaaattagctgggtggtggcgggtgcctgtagtcccagctacttgggaggctaagccaggagaatggcgtgaacccgggaggcggagcttgcagtgagccgagttcgcgccactgcactccagcctgggtgacagagcaagactctgtctcaaaaaaaattaataataataataataataacatttcctgaataagtcagttaaatttctaaaagattccatagtttgcgtatgatctacagcagttctcaaagtcctcccagaggtagaacaaatacaaacaagagaataatgctaaaagcatacttaaaataattaaatagggcagcacacggtggctcatgtctgtcatcctagcactttgggaagctgaggcaggtggatcacttgagcccagaagttcgagaccagcctggataacattgagaaaccacaaaaaataaaaaatttagctgggccaggtggtgtgggcctgtagtcccagttgctccagtggctgaggtgggaagactgcttgagcctggaaggtcgaggctgcagtgaactatgactgtgtcactacactgcagcctgggtgacagagaaagaccctgtctttaaaaaccccacaaaaaacaaaactaaatatatttagtattttgtacttagatttatttatttatttatttaatttgagacagagtcttgctttgtctcccaggctggagtgcagtggcgcgatctcggctcactgcaacctccgcctcccaggttcaagagattctcctgcctcagcctcccaagtagctgtgattacaggtgcgcatcaccatgccaggctaatttttgtatttttttaatacagatggggtttcaccatgttggccaggctggtctggaactcctgaccttgggtgatccaccccctttggcctctgaaagattaatttttatataagagttgagtacggataagctgtagcaagtaccaaacatttaagaacaatttgttagagaaatatacaaaagcaagctcaaaaaattttaaaaaatttaaaaagcttgagtgtggtggtacacacctatagtctcagctactcaggcagctgaggtgggaagatcacttgagcccaggagttcaaggctgcagtgagccatgattgagaaactgtctttaaaaaaaaaaaaaaagtaagactgttactccaagctggagtgcagtggctattcacaagtccaatcatcatatacgatggccccaaactcctggcctccagtgattctcctgcctcagcctcctgagtagctaggactacaggcgcgtgccaccacgcccagcttttaaaaaaatccgcattcttttttttctctgaatgggtaaaagtcttccattatttgatttagttcagtttagagaacacaataagcactacatcaagatattatgtgagaaccattcacttaaaagaatatttttcaaatagtttaaagcagggaaatctcttcttaaataaaataattgcccagaatcacaatagagaaagcagataaaaagaagcgctgctctggttaaagtggggtgggggcatggaactttattctgaagccttcctgccccatccgtaggcatctttgtggaactttccagggtgcctccaaatgtgaaaaacactaatcgaaaaaaccgtctttacacctactatgtacccacaaaaataaacaaaaaacccatcctgtttgatcctctctctgattccattcttctttatgtatgcgtatctactttttaaatgtatatatttattgccttatttttaggcaaaatcattctcaagtcagttgcagacattatgacactttacctctaaataactttagtatcttatctcttaagaataaggacatccttctgcataaccacagtatttcacacctaagaaaattacactaattttttttgtttgtttgtctgagacagagtcttactctgtcacccaggctggagtgcagtggtgtgatcttggctcattataacctcctcctcctgggttcaagagattctcctgcctcagcctcccaagtagctgggattagaggcatctgccaccatgcccgggggtaaattttgtatttttagtagagatgaggtttcaccatgttggccaggctggtcttgaactcctggccttaagtaatctgcccacttctgcctcccaaagtgctggaattacaggtgtcagccattgtgcctagccagaaaattacaccaatttaatattctagtatagagtccatatttaaattttctccaagctttcttttatagcttttgtttttgaaccaggatccaatcaaggtcacgcagtgcgtttgggtatgtttttgaatatctttttatctaggacagttccctcaccaccagttttacttccatgatgttaatttttttgaagagtccagttcaattatcttacagaatgttcttcatttgggatttgtgggattcttttctgatgattatgcattatgttctgatttatatcaccagctttatgtatactgtgtcttctccacaagacaatcattagatttttgagggcaaccatgtttcacaatacccagagctgtgtcacataatccaatttaatccagaggctgtacggggttctgttacctgttatacggcactggatgacacagaaggaagctgagcactatatctgtgtacttgggtctggatataaataaactcacggtatttatgatttgttggcggactctaggctggctgattatggataactgggcacagataactcccataatttctggcacctgaagaggaaaaagaaattactaagactgtaatcctataggacactgatggttactgaggatactgtggccatttctgaaaggtcttgggggggtgacttttttttaaagacagggtcttgctctgttgcccagcctggaatgcagcggtgcaaacatagctcactgcagccttgaacccctggcctcaaatgatcctcccacctcagcctcctgagtagctgggactacaggcacacaccaccacacccaggtcattgttgtatttttttgtagagacaagatctctctatgttgcccagactggtcttgaattcctgggctcaagcgatcctcctgcttggcctcccaaagtgctggaattacaggtataagccactgcgcctgacccctagggggtgacttttaaacaaactgtttattattttttgaagtttatgattaaaactacttaaaatatatctgtatgtgtgtatacacatatgaaggatttggaaagatttataatcaaagctgtcaatactgtgtttttgagggacagagtattagatttttttgcttctatattttttctaatttttcctcaataattgatgtattgattttataacaagacaaactaataaaagtgttgcaaggaagctgggcttttttccactgtgactctgagaatggcagtggagtccttacctatcttctttccagagatgtccatcaggcttaggtaagggaaataggagccactgggctttggtctatttctctgcttggaccgctcttcccacccacagacgcatgggttcctgtctctgtggaaatgtcagcttctcagagaggcacacctcaaccacttaatataaaatggccatcatcagcaccagtaggctgggcatggtggctcatagcagtaatcccagcactttgggaggctgcggcaggcggatcacttgaggtcaggagttcaagacctgccttgccaacatggtgaaaccccatctctgctaaaaatacaaaaaattagcttggtgtcatggcaggcgcctgtaatcccatctacttgggaggctgaggtggaagaatcacagcaacctgggaggcggaggttgcagggagcaagactgcaccactgcactcaagcctgagcaacagagcaaaatgctgtctccaaaaacaaataaacaaaataataataataataataataatgataataattctggctaacaaacacaagggtaaatttaccggcgttttgcggaaagattttcttccctgaatcaagacataaaaaggaaggcaacatctttcttcttcttggacttagtctactccactcagaaagtccaaaattgctctgactaccttatgaccacatgaacagacaaggcagaaggatgaagaaacccctgggtcttcaataacactgttgaatcactgaatcaatcttggaaaatactctatgtccagacttgttattatgtgaaagaataaatcctttggttaaacttctacctgctgggctttttttgctgctaaaagcacccaactgatacaaatgcccatctcacctgctcttatcgtgttattctttttgcatctttgttattttaataggttaaaaaaagggtgctcatcatttgttgttgttgtttttaatttgttttatttgttgttgttttttgagacaagatctccctctgtcgcccaggctggaatgtaaaggcatgatcatggctccctgcagccttgtcttactgggctcaagcaaccctcctgcctcagcttcccaagtagctgggaacacaggtgtgtgccaccatgcctggctaatttaaaaaaatttttttgtagagatggggtctcactatgttgcccaggctggtcttgaactcctgggcccaagcaatttgcctgcctcaacctcccaaagtgctgggattataagtgtgagccaccatacctggccggttctcatcattcttaaattattttttatttgtacccaactacaacatccagtggtatttcaagcttctttcctccctattccccaggtctgttcttcagagagaactacttttatcccttttgtctcttccagcatgtccttctctatttctaaataacataactatatagttatttcttaatgtattaattttagatatatttagataaattctcttaattttgatttgtaagtctgcctccttctagggtcacttatggctttttatttacttttatttatttattttgaggcagcttgtcgcccaagctggagggcagtgacgcgatctcagctcactgcagcctccgcttcctgggttaaagcaattctcttgcctcagccatccaaatagctggcaatgcaggtgtgcaccaccatgcctggctaatttttgtattttaagtagagacagggttaagctatgttgccgaggctggtctcaaactcttgagctcaagccatctgcccacctttgcctcccaaagtactgggattacaggcgtgagccactgcgcctgaccacttacagctttttaaatcttgatacctttaacccatctggatgagtatctaaattaaagttattctcatatgtgttagttatatctccccagaaaaactctactcttctagaaaatatggaccgcatctttttttttttttttgagatggagtctcgccctgtcgcccaggctggagtgcagtggtgcgatcttggctcactgcaacctccacctccaaggttcaagcgattctcctgccacagcctcccaagtagctgggactacaggcacgcgccaccacgcccagctactttttgtatttttagttgagacggggtttcaccatgttggccaggatggtctcgatttcttgacctcatgatccacccgcctcagcctcccaaagtgctgggattacaggcgcgagccaccgtgcctggtcatagaccacatcttagattaaaaaaaaaaaagtctccctccctggttacatacacagtagttgtttggtgtatgtttatagagtggatatttatgactaaacagactaaggtttgaccctgtactcatgagtagtcgttctcagctgagaaggacaagcagagacttcaatagctgcagggatgaagaggttctactggctttttgaacccaggaaattgccactgaaagtttaccttctcaaattgggactctgtattttttgccaaagttagcagtaattctcctgctgatcgctggatgcagggatgtttcagggttttcagggtatcaaatgtagtcattataaactggcagagctcatttgaatcaagaaaaccttcaaagacctgaaatgatgtaggaaaatgaacttccaagaaatagggaaatatggtatgatagaaagtgtcctgaacaaggacttgagtctaagttaacaatcagagaagtggacaaagatgtacaaggctgttttatttgagtcttgtggttttgttttgtttttggagatagcatcttactctgtcatccaggtaggggcacaatcacggctcactgtagcctcaacctcttgggctcaagtgatcctcctgcctcagccttctgagtagctgaggctacaggcacctgctactacactctgataatttttaaaattttttgtgaagtcaggggtctcactatgttgcccaggctggctgtgaactcttggctcaagtaatccttctgcctcagcctcccaaagtgtcaggattataggtgcaagccatgcacccagcccagtcttgtttaccatggtaaaaaggtggaagcaatccaaatgtccactgctagcatctgtgcatggccttttgctgctctgacactgaggctggagtgcagtggtgcgatcacagctcactgcagcctggacctcccaggctgaagtcatcctcccacttcagcttcctgagtagctaggactacaggcgtgcaccaccacagccagctaatttttttatttgtggagatgaggtctcgctatgttgcccaggatggtctcgaatcctaggctcaagtgatccttccgcctcagccaaccaaagtgctgggatgacaggggtgagccactgcatccagcctgctgctcttacatttagaaagaagctttattgaccaggtgcagtggctcatgcctgtaataccagttgtttgggaccctaaagcgggagaaatacttgagcccacgacttgagactagccacttggccaacatggagaaacactgtctctactaaaaatacaaaaattagctgggcgtggtggtgcttgcctgtaatcccagctacctgggaggctgcgggaggagaattgcttgaatctgggaggcggaggttgcggtgagacgagatcgtgccactacactccagcctgggcgacagagcaagactccgtctcaaaaaaaaaaaaaaaaaaaaaaaaaaaagaagcctggcatgtggctcatgtctataatcccaccactttggttgggaggccaaggcaggtggatcacctgaggtcagagttcaaaatcagcctgaccaacatggagaaaccccatctctactaaaaatacaaaattagccgggtgtagtggcacatgcctataatcccagctactcaagaggctgaggcaggagaattgcttgaacccaggaggcggaggttgcagtgagccaagattgcgccattgcattccagcctgggcaacaagagcgaaactctgtctcaaagaaacagcccccccaaacaaaacaaaacaaaacaaaacaaaacaaaacaaaaagaaaaggaaagaaaagaaaaagaaagaagctttattatgagatcttcagaaagagtcatacttttatacgataggacttaaaaaaaggccctaatgttacacagctgacaggttcccaggcataattaaaatgccttgtcaggagacaacatactaaaagaatgtgtcattctgtttctcattgcatttggtagtaaagtccttcacatgattataataggtacaatctactgggcacttactatgtgacaagcatttagcaaagcattttccatacggtatctcctttaacaacgactgaattgtaaacagtataaattgtaaaaaagaaattgtaaaaactgtcccaatttttacagatctccatcgcacagatgagaaaactgatgtgcagagagatgaaattacttggtacctttcaccctacatgagtaagatctgtgggttttctttattttcccctattccctagcatacctggtacctggcagatgtataagtatttattgaataatgaataactacattaatttaaaaagtctggcttgttggatcaaccatactctcttgcagctcctttttgtgaccagcatttacatttgcaagagactcgcaattatgaatagtaggagcagagctggtatgaagtgaagtccagggatactggcctcaatggcaggttgaccttaacccccaaactaagaaggcaaggcatatatgggccaggaacatggtgccttgtctccaaactacggaacgtttagagaccacgtttcctgggcaattgtgtatggttttgttttataagaaactaccagaactttttccaaagtggtttttactgttttacgtttccatgaataaatggcaggagacttctggttgttccccatccttgccaacacttctggctgtggttataattttagccattcttattacctgggcaattctgaagggacagttgtagaagcatttagcggcagagctgtggagctccaggaattctcgacattttgtcaatgctcttttcaagttttgctgatctttcttgtcatgagtgatatctgaaaagaaaatataaaatattaatactttctggcttctttttttcttcttgattttacaggtctggttgatcttcagtttaaagtggattccaagatctcactcttctttttcacttgaacaaaaatgcctgggggagggagtgtttgttcatctgaaggctgatttatttctctttccttctagaacaatacataaaaagaaccaaaagaaaaaacaaagaggaggtcgaggcagatggatcacttgaagtcaagatttcgagacaaacctggccaacatggcgataccgaaaaataaaaaaattagccaagcatggtggcgcactcctgtagtcccaactacttgggaggctgaggtgggaggatcacttgaacccaagaggtggagcttgcagtgaaccgagatcacgccactgcactccagcctgggtgacagagttaagaccctgtcttttcttttttaaattttttttttgaggcagagtttcactcttatcacccaggctggagtgcaatggcgcgatctcagctcaccgcaacctctgcctcctggaggtgattctcctgcctcagcctcctgagtagctgggattacaggcatgcgccaccatgcccagctaattttgtatttttagtagagatggggtttctccattttggttcagactggcctcgaactcctgacctcaggtgatccacccacctcagcctcccccagtgctgggattacaggcatgagccaccatgcccagccaaccctgtctttaaaaagaagaagaagaagaaaaaagcaaaagcaaagagctttttgtaagaccagagcatttgagtgatttgtgagtacaaccaaagcatgctaccttatttccccactggtgaggaactgtgaggggtctccctatgaagcttaggttcccagaaaaaattgcccaactctatactgtgtatgataattctgatatcagaactcttcatcatgtgtcaagtatgccaatgctccttgtagtgtcttgtttttctcatgtttcattgtgacctaatatttgctggaaattcgtagatggaaaatttatctttgagcccttggctgaggatactttctctccaactagaaaataagttccctgggggaaggtatcttgtttgtcttgattactgatgcatcactagaacaataaatgcttcataactatttgctgaatcaataatcaacgtatttctttggctgtatacctggtagagattgctcatactgtgcccaatgacaggacagttgctttgggaagcatggagcttcctcatccatgtgaagcgcagactgaggcagaggaactacggttgtgtgtagcttaacaacagggatatgttttgagaaatgcactgttaggctattgcgtcactgcatgaacatcacatagagagtaccttctttttttttttttaagacagagtctctcactctgtcacccaggctggagtgcagtggcgtgatctcagctcactgcaacctccacctctcacgtttaagcgattctcctgcctcagcctcctgggtagctgggactataggcacgcgccatcacgccaggctaatttttgtatttttagtagagatggggttttgccctgttggccaggctggtcttgaattcctgacctcaggtgatggaccctccttggcctcccaaagtgctgggattacaggcatgagccactgtgcctggcctaattttttttttttttacattctaaagtgtttttgttaaaaactaagacaaaaaacacacactagcctaggcctacacaagatcaggataatcaataccactgtcttccatctccacatcctgccccactggaaggtattcagggcaataacacgcatggaactgtcatctcctatgataacaatgccttctttaggaatacctcctgaagggcctgcctggggatgtttcacagctaactgtttttttaataagtagaaggagtcatgctaaactaatgataaaatgtatagtaaataaatgaaccagtaacatagttatttattatcattaccaaggatatatactgtacctaattgtaggtgctatacttttatatgactggcagtgcagtaggtttgtttacaccagtatcaccacaaacatgaataatgcattgtactgtaatgttatgatggctacaatgtcactaggtgatagaaaactttcagctcagctgggtacggtggtggacacctgtagtccctgcactttaggaggctgaggtaggaggactgcttgagttcaggagttggagaccagcctgggcaacatagtgagacttcgtttctttttattcttttttctttcttttttttttttctttttgagatggagtcttgctctgtcaccaggctggagtaccgtggtgtgatcttggctcactgcaacctctgcctcccaggttcaagcgattctcctgcctcagcaccccaagtagctgggactacaggcatgccaccacgctcagctaatttttgtatttttagtagagacggggtttcaccaggttggccaggatggtctcaatctcttgacatcgtgatccacccgcctcggcctcccaaagtgctgggattacaggtgtgagccactgtgccaagtcgagacttccttaaaaaaaaaaaataataaggctgggcgtggtggttcacgcctgtaatcctaccactttgggatgctgaggcgggcagatcacttgagatcaggaattcgggaccagcctggccaacattaagtaacatttagtagggatggtgaaaccccatctctactaaaaatacaaaaattggctgggtgtggtggcggctgcctgtaatcccagctactcaggaggctgaggcacgagaactgcttgaacctgggaggtggagggtgcagtgagccaagatcacaccactgcactccagcctgggtgacagagcgagactccatctcaaaataaaataaaataaaataaaaagaaaaatttcagctccattctaatcttacgtgacccatacatgatcagttgttgactgaaatgtcattatatggtgcatgactgtacttggtagggatggagtagactgagattcaaacactgggggaatgctgggttagatatcctctaaagtcccttctaaccatggaagtcagtgattcattccttgaccacactggccctctctctatttttcaaactcctcaagctcatgcctacccaggttcctttccttagccattccttctgcctaatatactcttcttacctcttcaggtggcaaactgctctttattctctggattacctttcctgaacccagcaactagatttgattcttactcatggcccctgtaatttcccttcataaggacattaattttcctgcagcctcgacctcctgggctcaagcgattctcccactttcgtctcctgagtagttgagattataggcatactccaccatgccagctaatttttaaaattttctgtagagaaggggttttccctgttgcccaggctggccttgaactcctgggcccacgcagtcctcccggcttggcctggcaaaatgctatgaacataggagtgagccactgcgcccagcctcactcctacttctgaccaaactaatcactctagtttgtccacagggccacatgtttagccactccctggctatgcagatggatggcaatgatgggtctgatctagtgttaggattctaattattaagtcagtgttgcttcatctctgcctatggaccatgtatccttctctttaggaactactgtaaaaggcctttccagaacatggggactgaatgcgtaaggagggcaggtacttatgttgtgctggagaattcactcaggacctcgcggccttcagcagtgccttacacttcagcctcagggtgatatgcagcagggagtgaatgccctctgcagcctcctcagccaccttttcctgtgggtccccacagagcagtgccatcagagccactaggtgtccaagtctttggaatcgcagtggaagcttgagaaagaaaaagaaaaatgtcattagaatacacgtgcatttagtgccttcgatttgagttgttgagaagtaatcccaattctactctcaactcaagaagtttaagggtcacaatcagcctgtggatctctgtagggttcatatttaacacaggtagacacagtatagtcagtagatggtgttattaagaaatagggaaatgctaacctaaggaaacaatctgaaaaacgaaaaagctttgtgcataaagatgttaattccagcactgtttttatttttattttttaattttaatttttgggagtacatagtaggtctatatatttgtggggtatacagatgttttgatacaggcatgcaatgcatagtaatcacatcatgtaaaatggagtatccaccccctcaagcatttatcctttgtgttataaacagtccaattatattcttttagttattttaataatttttttttttgaaacagagttttgcccttttcactcaggctggagtgcaatggcacaatctcagctcactgcaacctctgcctccccggttcaagcgattctcctgcctcagcctcccgagtagctggaattacaggtgtgagccaccacacccagctgatttttgtatctttagtagagatggggtttcgctgtgttggccaggctggtctcaaactcctgacctcaagtgatccacccacctcagcttcccaaattacaggcctgagccactgcagctggccaataaacgtacatttaatattactaaataaaaatgtattaaaattttaatattatttaaaaattactaatgcacaatagtcaccctgttgtgctataaaatattaggtcttattcattctaacaatgtttttggtacctattaaccatgcccacctctccccaatcctgccacgacccttcccagcctctgataactatccttccattctctatctccatgagttaaactgttttgattttcaggtcccacaatatgtgaaaacatgtgatgtttgtctttctatgcctggcacatttcacttagcataatgacctccagttccatccatgttgttgcaaatgacaggatctcattccttttatggctgaatagtacttcattgtgtataagaaccacattttctttatccattcatctgttggtggacacttaggctgcttccaaaccttggctatggtgaagagtgtcgcaacaaacaagggagtgcagatatcgcttccatatactgatttcctttctttggggtatagacccagcggtggtctaaggaccgcgctttggaaataattgcatgacagtagtaaaaggaattatcctacagccagtctatgaacacaaccattaaaaatcaagtatctaaggaatttataatgtgctattctgctaagtaaaaaagctgaatgtggccaggtgcagtggctcatgccagtaatcccagcactttgggaggctgaggcgggtggatcacctgaggtcagggattcgagaccagcctgcctggccaacatggcaaaaccccatctctactaaaagtatgaaaatcagccaggtgtggtggtgggcacctgtaatcccagctactcaggaggttgaggaaggagaatcgcttgaacctgggaggtgcaggttgtagtaagctgagatcgtgccactgcactccagcctgggtgacgagagtgagactccatttcaaaataaataaataaatacataaatacatacatacatacatacataaaataaaaaataaaaataagctgaacgcaaagttgagatatagcacttaattctatttataaaattcattttttaatatcctgcttgattatggaaaaaaaatccatgtaatgtagctggaaaaatcataccagaaaaagaaatataactttaaataaatactggagaaaactggataaattaaaaaattggctgggcgcggtggttcatgcctataaccccagcactttgggaggccaaggcggacatatcatttgaggtcaggagttcaagaccagcctggccaacatggtgaaaccccgtctctactaaaaacacaaaaaaattagctgggcgtggtggcacatgcctgtaatcccagctactcgggaggctgaggcaggagaattgcttgaacctggtaggcggaggttgcagtcagccgagattgcaccactgtactccagccggggcaacagaatgagactccatttcaaaataaataaataaataaaaattaaaaaaattaaaaataataaaaaaacattaaggtagaaaagataaatgaagttaagaatttggttggcgctctccctctccttcatctccgtctcccgctttccacggtctccccctctccctcgtctccgtctcccactttccacggtctccctctgttgccgaggctggactgtactgccgcgatctcggctcactgcaaccttcctgcctgattctcctgcctcagcctgccgagtgcctgggattgcaggcacgcgccgccacgcctgactggtttttgtgttttttggtggagacggggtttcgccatgttggccgggctggtctccagctcctgacctcgagtgatctgcccgcctcggcctcccgaggtgccgggattgcagacggagtctcgctcactcagtgctcaatgttgcccaggctggagtgcagtggcgtgatctcggctcgctacaacccccacctcccagccacctgccttggcctcccgaagtgctgagattgcagcctctgcccggccgccaccctgtctaggaagtgaggagcgtctctgcctggctgcccatcgtctgggatgtgaggagcccctctgcccggccgcccagtctgggaagtgaggagcgcctcttcccggccaccaccccgtctaggaagtgaggagcgtctctgcctggccgcccatcgtctgggatgtgaggagcccctctgcccagccacccagtctgggaagtgaggagtgcctcttcctggccgtcatcccgtctaggaagtgaggagcgtctctgcctggccgcccatcgtctgggatgtggggagcgcctctgcccggccgccaccctgtctgagaggtgaggagcgcctctgcccggccgcgaccccgtctgggaactgaggagcgcctctgcccggccgccccatccaagaagtgaggagcccctctgcccagacgccccgtccgagaggtggggggcgcccccgcccggcagccgccccgtctgggaggtggggggcgcccccgcccggcagccgccctgtccgggaggtggggggtgcccccgcctggcagccgccccgtctggggggtggtgggcccctctgcccggctgccacgtctgggaagtgagaagtccctctgcccagccgccaccccgtctgggaggtgtacccaacagctcattgagaacggccacgagaacgatggcggttttgttgaatagaaaagggggaaatgtggggaaaagaaagagagatcagattgttactgtgtctgtgtagaaagaagtagacataggagactccattttgttctgtactaagaaaaattcttctgccttgggatgctgttaatctataaccttacccccaaccccgtgctctctgaaacatgtgctgtgtcaactcagggttaaatggattaagggcggtgcaagatgtgctttgttaaacagatgcttgaaggcagcatgcaaaaaaaaaaaaaaaaaaagaatttggttggcatgcagaatgcataatcatcatttgcttgaggcaggccacagagcaaggctctgaactctctcatggctaatgtagaggtgcacacaatgatccatataacatgattcacgctgtccttaagataagaagcaactagccacgtggaggaagcatagcttttcctagggttgagatggaaagaaatttcttccatggctctacagaaataagacacagaaatattgtgaacagcatttacaacctatttacagtaaacacgtagcaacatgcaaagctatgtaacatctttaattcactgatataaccttcattcattcaatcaaccaataaatacagtgtctgttatatgccaggaactatgactggcactggggatataagcagtcaacaaaagagaatatccctgcttgtggaggtgatgatctagttggggaaacacaaagtaaacaaaataaatatgtaaaatgtattatgtatcaaatgatgataaatgtcatgattaacaaaaattcaggggaaagggataagaattattattttaggatggtcagggaaggcctcactaatattgaaatgagagattgatacctgggagaagagtattctgggcagagagaatggcaagcgccaaggactgagaaggtatgtttggtgtttctgaggaaccataagtaggttaggttggctgcagcgatgttaacgatagggaaagaaataggaagtagatgaagaatgggccagaaggtgtcgcaacctgtagaacattgtgaggactttggccgtcggagggtcttgagcagagaagggacatgggttgactcacatttactcaatcaatattgaattgagcatcaaccacatggccgattctgtgctaggcaggcactgaggctactgtgctgaacaagacaagtataattgcaaggcacagtggctcatgtctgtaatcccagcattctgggaggcagaggtgggaggattgtttgagcccaagagtttggaccaccttgggcaatatagtgagacccccatctgtataaaaaacaaaaaaattaaccaggcatggtggcacatgcctgtagtcccagctactcaggaggctaaggcaggagcattgcttaaggccaggaggttgaggctgcagtgagctgtgattgtgctactgtactccaacttgggtgacagagcaagaccctgtctcacataaaaaaaaaaaaaaaagacaagcataatcactggtagaatttacattctattagtgggaaacagataacacagcagtaaagaaagaatcaagccagataacctctgattctagacagccctaggaaggagagagtgatgagacagagagcaagcgtaggtctgtctgtggtgagcagaggcccttttgaggtcgagacatctgaacacagtgctaaagaaccaggaggggctggctctgtgcagagctagggaaggtcattccaagcagagaaggcagcaagtgcaaaggccatgaggcaagatgagccttatgtgggaagaaggaaggtaaaggtggctgctgtgtgataagtcaggggacttaggtgtagagaggtagacagacctacatcagacatgaccccgtattctaagatcagtttggaaatcactggatcaaagaagtgacatggggcaaaaaaagaaaatgaagaaaaataaagaaaacacaggggagaaaacaaggaaacaaaacaaaagcaagaatgacatgggtctgaagaggatgactctggctatatgtagagaacaaattggaaatggaagcccccaccccaacacactcatgcacaaaaaagaacttggaaggtgccaggcgcggtggctctgcctgtaatcccagaactttgggaggccgaggcaagcagatcacttgaggccaaggattcgagaccagcctggccaacatggtgaaactccgtctctactaaaactacaaaaattagccaggcgtggtggcctgcacctgtcactgaatgacaaacagttaataagttttgttttttttttttgagatggagtctcgctctgtcgcccaggctggagtgcagttgcgtgatctcggctcactgaaagctctgcctcccgggttcacgccattctcctacctcagcatcccgagtagctgggactacaggcgcccgtcaccacgcccggctaattttttgtatttttattagagacggggattcaccgtgttagccaggatggtctccatctcctgacctcgtgatccgcccacctcggcctcccaaagtgctgggattacaggcgtgagccaccgcgcccggccctaagttttataatcataatattaagaacccccaaactttatcaagacaaaaaaggccactgaagaattacgctcctagtttgattactaaatgcttcttcagcatttccttttttattctttattctttagatttctttgagaatatgaaaaaagttagagacccagataatatatatttgtcaaaactcattgaactgtatacttaaattggataaattcattgtatacaaattatacctcaataaaattgatttaaaaaaaaactatggaccttcctcagaaaaatccagaagaggacgggcgtggtggctcacgtctgtaatcccagcactttggaaagccaaggaaggaggaccacttgaacctgggaatttgagaccagccagggcaacatggtgaaaccccatctctaccaaaataaataaataaataaataaaaattagccaggcgtggtggcgtgtgactgtagtcccacctacttggaaggctgaggcaggaagattgcctgaggccaggagttcaaggctgcagtgagctatgatggccccactgcactccagcctgagtgatggatcaagaccctgccttgaataatgatcatcataataatgagatgccataggggagatgattcagaactgagaagtgagagagagaaagagaaatgtgaggatctgaagaggtgccatagtaccactctctttgagttgctgggagatattgaagttgatttatttaaatttgcctgctgtactcaaatataatactatacagagactagccaccatgggcctcaggtattttcaggttatagttactatatcattatgttccagctgttgtgttaagcaatggagatgcaaagattaatcaacacagcaactggccccaagctgctcaggagaagagcagataagaagacaatgctaagtgctatgatagtacatgagcacgaaggggacacagaaccagcctggggagttataaagaggaggagaaatcggcagtgagggaatggctttggatctttcctcctctgcaactgaagggccgctcaccttcaagttgagatgtttggataggcacttcagaacttgagccatgctggccgtggcccgttcccgctcatggtctttgactgactgtaaccaggggaccaagtgctgtgagaaataaagggaggctaaatggtttatcaggaagatttgggataccatccttattgtgtttagaaagaaatgtggagtgacaagttccatgttgctaccagatctcaaaatactttgctaaatgctattatagctcaggttggaaataaaagtggtagaatgacaagcaaggcacaaagacatgggtggtgggtggtttggttgttatataggagcttaggagcttcttttcttttttttttttgagatggagtcttgttctgttgcccaggctggagtgcaatggtgtgatcttggctcactgcaacctctgcctcccaaattcaagtgattctcttgcctcagcctctcgagtagctgggactacaggcactcgccaccacgcccagctaattctgtatttttgtagagacggggtttcaccatgttggccaggctgatctcgaactcctgacctcaggtgatctgcccgccttggcctcccaaagtgctgggattacaggcgtgagccactgtgcctggccagagcttattttctagacttactttctcttcagcccaattcttcaattaattattctgtacttctgaatgtttttagctctttcaaatctgctttggaaagaaataaagttaacaacatgctactaattttaaagtttaactctgaggacagccaggtgtggttgctcatgcttgtaatcccagcactgccggagggattatactgactgcttgagcccaggagttggagaccagcctgggcaacatggtgaaaccccatctttacaaaaaaatacaaaaattagctgggcatggtggcgtgtgcctgtagtcccagctgctcgggaggctgaggtgggacgactgcttgagcccgggaggcggaaactgcagtgagctgaaatcgcgccactgtactccagcctaagtgacagagcgagatccagtctcaaaaaaaagagaaaaagaaaggcttgaattaagctgccaaggcaggaaagtacaaagtacaactgcataaagaggagaaacccaatctggctggtatgctaatgtacaaatagaagaggaatgagaagtagtattaaggtcagttaggatgagaataaatgcccatcagagcatttaagaaaataagctagaaaataagctcctgtagcagccaaaccactcgactgcctaggtttttgtgccttgcttgtcagttaggacaacaataaatgcatcatttgggtgcaaacgattaataatagcttaaagccttatccctttctgggatatctgcatcttaaaaaaaggataagaaaaataaaaataaaataacaacaataaaaaaagggtaggagagcaagatacctgaatgcagtgaatgaattccaatgaatcaatctctagtgatggaagagcatatacaggaacaggtgcaggtcagagcagttcgtcattataacctttgagtatcatctggtaggaagctgcttatttactaactctttttttgttttgttttgtttttgagaagaagtctcgctctatcgcctaggctggagtacagtggcgcaatcttggctcactgcaacctctgccccctgggttcaagcaattctcctgcctcagcctcccgagtagctgggactacaggcatgcgccaccatgcctggctaattttgcatttttagtagggacaggttttcaccatgttagccaggctggtcttgaactcctgacctcaaatgattgattcgcctgccttggcctcccaaaatgctgggattacaggcatgagccaccgtgcctggccttactaactcttgaggctgacccttccctcatcactgaataaaacccttctatactagtgaggaataataatttttttttttttttgaaatagagtctttctctgtcacacaggctggagtgcagtggtgcgatctctgctcactgcaacctcctcctcctgggttcaagtgattctcatgcctcagcttcctgagtagctgggattacaggtgtgtaccaccacacctggctaatttctgtatttatttatttatttattttttagtagagtcagggttgtgccatgttggtgaggctggtctcgaactcctggcctcaaataatccacctgccttggcctgtgctgggattacaggcgtgaaacactgcgccctgcccccaggaataatttaaggaataattaagcaactatttaaacaatttattgtgacagggtgcagtagctcatgcctgtaatcccagcactttgggaggctgaggtgggaggataacttgaggccaagaattcgaggctgcagggagctataatggtgccacttcactccagcctaggccacagagcaagaccctgtctctgaaaataaataaacaaataatttattgaaggccacttattcaatattcacagtaattattatctccatgtaaatgtgaagaaatgcaacactgagagagcaaattccttgcagaatttctagcgggaggacgtgtaaccaatgaatggcagagtcagcatttgaacccaagtctctgactcaaagttgatagctgatactctttactacgttgcctcttaccactgaatacttccacattttcatctcccactttcaccagttaataggaatcatttcccactctcccttgatatcttgtttaccttaataatggtgtcaagattttccaaatgtgggtcttttaccaccaaactctggagcatctcagagaatgcctgaaacgtctgcctgtaaagacactgaaaaggcacaggatcagcaacactccctggccccacgtgaagttcccctagcatgggacactttggaggctcttcatgtgaccctaagactttactcaaagttgcagtaccagtgtaaaggtactagtaggttgtttgtggcatgaggtaaaaaggaatacatcttcatttcaaacaggcgcctcggcactagagggatcacagctgactgagtcttactacatctggggaactgcttaagggtcatcaagattctttaaagttggcttgtgactctttctgatatcttcaaacagaggggaataaagtcctcttgggtaactgctttaccaaccagtttattcgccactgaagaagagatcaaggcctgcacgtacccttccctctgcttgaaagctttctctccagacatacccacacctcttttctttcaattatcatcccatcatgaaggctttgcctgaccacccatgtgcctcccaaccacagggcccttgatcctgctctttccctgctttacattttcataacacttattatcagctgacatattatatgcatgtatcaacagtttgtctctctgcactagaatgtaagttccgtgagtgggactggactgctgtattcctactgcctatcatcatttttggcatatgatgacatacggcacattgtgtgcttaaataaacgttaagcacacaagcgagtgctcccaccttattttaaagccaaaaggaaggaaagaataaagggaaaaggaaagaagacaaaatgaagggttgaaagaagctatcttctaatttaaccacctattttatttaccagacttggcttatggtttttggctagtttcaaaaaatcaaatgcactctccaaaggccaagatcagctgaccctgtggatggaaagttactaaagcaaagcatgagttacctctgtgttgcaggtcccattgggcatgatttcctgtatctgggtaagggtccttacagagggcagagtgattatactcttgatggtaagactgaacaactcagctcgatcttcagagcccaacagcaaatggacatcttggtaactaagaaaagacagtttgggaacagcaagctggaaagacggtttgatttgatactgataagcagagatcaactaaaaaggaaagggtagacaggctagtgtactgttctgatgtgagaaataaatggcatagcttgtcagtctgttcagataaatctcacaaaaggttagaggaagttttcccccaagaagttactggagcaatatccttccaggcttcccttcagttcagccacagagggaagcctgctacagtctaacgtggtaagccacaattttccaaagcatattctgctgaatgttcatttggggaatcatgggttgaatctagttaaaaaactttttaaccacaagacttctcagggtctttgatcagcttaatcactacaatataaatctctgagaggtagacaataggcagcccttccaaatttcttagaagccggaactctaatgtcatgagacatatatgggagtaacttcctgccaaatatactttggacaaaactgaactccaaagagattccaataaagtctttcagatatggatagtagcatatatgaaatcaaagtgcttactcaaaaacacggatttggcttcctcttttctacataaacagttttcaaaagttaaaaatatggatcatggccaggcgcagtggctcacgcctgtaatcccagcacttttggagggtgaggtgggtggatcacttgaggtcaggaatttgagacgagcctggccaacatggcgaaaccccgtctctactaaaaatacaaaaattagccaggcatggtagtgcacgcctgtaatcccagctactcgggaggctgagtgaggcaggagaattgcttgaacccaggaggcagaggttgcagcgagtcaagattgtgccactgcactccagcctgggggacagagcgagactccattgaaatggactccattgaaaatttttttttttgaaacaaaaaaaaaaaaaaaaaaagggtcatgtcagttggacctggcattggccctgagaggaaccaggatgcccgtgtaaggggcgtgtgggcatcacctgagatcagcgatggtgacaaagacctcctggcgcatggaactggacagagaatgcgggcgttcctcttgtaccagtacctgcaatgagagggaaagaacttgagagttgagaaagtacccattcattaggccagtgacgatcagagactgggtggccagcaagaaccacaaaaggtccttcagccagccctgctcttaggccccagatgcctggcagcaggacagtgacagggataggggtttattctcttgagccagaccccagaccctggctctgcctcttaccaggtgtttgagctgacacaaattatttaacctccttgtgcctcagttcctcatctgtaaaaccagaaaacaggaatacttaccttcatggggcggctatgagtactcactgagcaaattcatgacacccagcagccctgtgtaattgttagtgtctgttattcactctttttatcaccagtgattatttctagtttaggcattctaactcctctctccactaaaccagccatctctctatgatcacatctaatattattctgagttacttgtcccggaaaaagaataactttccaatttacaaactggcagagggaaagtgcattgctgtgctggaaaaacccgtggagtgataagcaggggctctggagtgggacagtccctgggctgcgcactggctctgccactcactcactgtgtgagcctgaatgtgtcatttaactccctgtgcctgagttgccttatctgtatggagaaaatgagctaatgtaaatgactgtagctggctggacgcagtggctcacgcctgtaatcctagcactttgggaggctgaggcgggtggatcacctcaggtcaggagttcgaaagccggcgcctataatcccagctactcaggaagctgaggtaggagaatcgctggaacccgggaggtggaggttccagtgagccaaggttgcaccactgcaccccagcctgggtgaaagagtgaaactctgtccccccaacaacaacaacaaaaaagactgtagcagaagccttgctggactgtccaccaggcccctctgggaactgtccccaacccacagaaatgggtacttcaaagctctgtgtctgctaggtcattctgtcccactggctacagctcatctgtcccagagtagacaccaaggtctattagattctctctggaatctggaattgggacacagagcttcaatctcagtctggatggtcttctaaaggaaaaaatttaaaatttggaagcactggtccctgtggatgaggcaactgagagggccaattttggggagagaagatgggggagagggagacggggtggggggaaagggagagagagaggagaaatggaaattcatacaaaggagcaaaaataagatatggaaagttctccttgagtatgtggaaggtttttattttctagattcattcccttcctgggtcaggctgctcctcctgtcaaggggttctgggaagcactcagtgatccttagaacaaatctcaccttttgtgtttcagctgcttctagaggatttctcttacctgcaaccaagaagatctcactaggaacttaggatgcaggctgggcgcagtggctcacgcctgtaatcctagcactttgggaggctgaggcgggtagatcacctgaggtcaggagttcgagaccagcctggccaacatggtgaaaccccatctctactaaaaatacaaaaattagccagacatgatggtgggcacctgtaatcctagctacttgggagggtgaggcaggagaatcgcttgaactcgggaggcggaggttgcagtgagccgagatggtgtcattgcactccagcctgggcaacaagagcaaaactccgtctcaaaaacaacaaaaaaacttaggatgcagtaagtgctcactaaacactacaaggttccctttcttgcccctttctgagtttttctcctcttactttccagctttggtctgactccgatcttgctggtgggctgctgctttcttccttattttctcaaggagcacatttattcttgcggctttatagtccagaagggacaaagcctaagactctatctttagccctgacagctctcccagggctctactcatctgcatctggttatctccagggcacaccactaacatccccagaattttggcattaaagtcagttcactgtggtccccgtgcgaagaacacagcttcctatcctttaatagctgtcaactgttccctttcccagggctcactaaaaaggtgattcatgattctttcttttgttcaagccctacctcctatcagttatagcatcagccaccccctgctctgcacggtttctgtgactctccattcctggagccatacgccttcatatggatgaaagcagggtctcttagctgaagccccgggcttgcaatcccctctgacttcaattgacttgatccacttctgccagaatcatcttttctttttttaatcagttgggtattgaaggtttattatttgttcacagttatgctggcctccacagggaattcaaaagtgagagggtattttttgttagtagagtatgtgtgtagcaggaactttctgggtgactgcccagatcacagcaatcaccctttctccctcggaacgcctccgaaacgcagggtgggacacccagaagtcatatcattactatatgatcttgcccccaggcaaacctgattgatgcaggggtggggaacagactagtttgggccaatcagattttctcttgcagaatttggaatcttacagtgacaggcacaaagcgggagttgctagagggttgagtcatggtgatggtagcgaagcccctgcctctgagagctctggagctgtcctgaaacttacttttctggaggcttgtttaaacctcatccttagagtctaagagagatatcccagcatcctttttttttttttttttttttttggtaacttacgtgagccagaggtgatttttgtttcttgcctgaagaatcctaactaatccaaacaaaattagacgttttgtctcaaaggtctttttttttttttttttttttttttttttttttttttttgtgagacagagtctggctctgtcgcccaggctggagtgcagtggtgtgatcttggctcactgcaacctctgcctcccaagttcaagcgattctcctgcctcagcctccggagtagctgggactacaggcgcctatcaccatgcctggctaatctttgtatttttagtagagacggggtttcaccatgttggcaaggctggtctcaaactcctgacatcaggtgatctgcccacctcagcctcccaaaatgctgggattacaggcatgagccactgtgcccagcctgtctcaaaggtcttaacaaaagccgagcagatgtgaatatctttattttactggtagagctactgatgttcagataagctaagtgatttgtccaaggtggggagggttttgtggaggacctcagatatagaattccgatggagtcccatggtggcagaggagaattaagaggcaaatctggttacattaaaattttattacagtaggtcttggtgctcatgtctgttgttgagtcactaaaaaccatctcctggccactctgccatattgcagaatgcagaaccctagccttggcatagccaagtagcattcttcagcttaccatctgaagtccttacccagtggtcctttctctcttctctcaatcctatccatcatatctttcaaagattaggtcagatccacctggattaatttcaccctaatcctgctgtcactttattctatatcccagttgccacagcctgcctcccttccctttccttccttcctctttttctttcttttcatttctcctcttctcttttctttcgttcttctttcctttgtctttcctttctttttctttctctctcctttctttttctttctctccttcctttcttctttttctttcctttctttctttctctcctttttttctttcctttttttctttctctccttcctttttttcttttttctttctctccttccttcctttctccttccttccttccctgcctccctcctctctccctccttcccttctcttccccttcccttccctccctcgctccctccctcccttcctcccttccttccttccttccttctttccttccctcactcctctttctccctttcccttccctcccctccctccctcctccttctcttcctctctctgtctccctctccctctctctctatttctttaaagatgggggtctcactatgttcctgaggctggagtgcagtagctattcgtaagtacaatcatagctcactacagcctccaacttctgggctcaagtgttcctcctgcctcagcctcgacagtggctgggactacaggcaggtgctaccacacccagcctcttttctttttcattaaagttctcaacattatataatgtatatttttatattatattgtatattgtatattttttacaatatacaataaactgtacatatttaaagcatacagtttgatgatttttgatatatgtatatatccatgaaaccatcaccatcctcaagagaatgaacatttctatcacttccaaaagtttctttgtgctactttgtgattcctcgctccttctcctcctcactcaacctctgcctctaggttaccattgctctgctgtcactatagattcattggcattttctcgaatttcatgtaaatagaatcacgcatgatatcctcttttttatctgggttctttcactcagcataactattttgagattgttccaagttgtagcatatttcaatagttccttttcattctcacgtagtattccatcatgtggatatacaataccacaatttctttatccgttcacctgctaatgaacacttgggcttcttctagggtttggcttttacatatagagctgctgtaaacatttgtgcatgcatcattgtgtggacatatgttttgttttacctaggagtgaaactgctgggtcatatggtaagtgcatgtttcactttttaagaaactgccaaattgttttccaaagtggttgtgccatttcacattcctggcaacactgtatgagagttttagttgctccatatccttgccaatatttggtattgcctttcttttttattttagccattttagtaggtgtatagttgaagcttactgttgttttagtttgcttttccctaatcacaatgatcagcatcttttcatgtgcttattttgagaaatttttggtgaactcatgcctgtcatcccagcactttgataggctgaggcaggcagatcacctgaggtcaggagttcaagaccagcctgggctggtctctactgtgaaaccctgtctctaataaaaccgcacaaaattagctgggtacagtggcaggtgcctgtaatcccagctacttgggaggctgaggcaggagaatcacttgaacccgggatgcggaggttgcagtaacctgagattgtgccactgcactccagcctgtgtgacagaataagactccatctcagaaaaaaaaaaaaaaaagaaaaagaaatatttggtgaagtgccataacattttttcccccttctttccactttctattgttggcttccttggcttttttaatttggatacttggagccatgcactggtttgggtcacaagcactggtaaatgccttaacgttttctttctctataatgaccctggcttcttcctccttgtcggttcctcagcagaaatgcttctcctcttgggcacctctccctttggttgctgggagctgtgctttttcagcccccatgtgtgggcctgtggggactttgtagacttacacaatgctgcagtgatccatgcaattttctcatggatactagctacctttaactcttctaggctgaatcccctgccagcctatactttgattgacatctgatgtgggcattttattactgggtggacagatgcaaatgcagattcagtgtgtaattcagtacattgttgctgttgagacctgcatttgtggattttatggactggctggttgaaccatgtggcaacccattgttgccaagtttggtgaaactagagctctagaaacatgccactctggctgggtcctatgatcctgcggttgcctacatcccctttcccaaggagtacagccaagtagaaagctgcatttgttttctgtttgtttttgtttttgttttgagatggggtgtcactctgtcacccaggctggaatagagtggcttgatctcggctcactgcaatctctgtctcctggactcagctgatcctcccaccttagcctcccgagtagctgggactacaggcatgcaccaccacatccggctaattttttttttttttttaagagattgagttttaccacattgcccaaactggtctcaaactgtttttttatttgcttgtttgtttgtttcttttttgagacagagtctcactctgttgcccaggctggagtgcagttgtgtcatctcagctcactgcaacctccacctcccaggttcaagcaattctcctgcctcaggagaagctgtgattacaggcgcctgccaccatgcccggctattttttgtatttttagtagagacggggtttcaccatgttggccaggctgatctcaatctcctgaccgcaagtgattcgcccacctcggcctcccagagtgctggaattacacatgtgagccgccgctttttgttgttaaacctgtattatatcatcctgttcttcttaatgtattatttggaatagttctcaacctatttactttttgaaatatggctacttacagatggatcctaaacccttcaagggcaaggattaaggtttccaggaaatgcgtaacctttatcaaagcaccacagtgtgtttggatatagaagatccttggtaactgtccattacttaaaactgttagctggttagccttgaattataaaagctatcagtctaatcagccttatagatctgtgatatgagaaagaactactcatatttctggagtatgtaagaaatttcaacatcagaattttaaagctttagagaaactgaaggagacatttcacagatgagaaaactaaaacaccaagaagtacttgcttgagtgcatcagctcctttgcaatgcccttctggatcctttgccatggaactgaccactcaatctctactctcagccccccatatgcctatttaaacttgtcacagttcctgtgacattttattataccttgcttggctgcataaatagggattttgtcttctttgtctttgtagcccaaattcccaagacagttcctggaactgtcaggcacttaatgagggaatgaatggatgagttggtggcagagtgtggctggagtaagtacaaatagaacaaaatacgataacaataatatagtcatgtttctcaagtggctcgtgtgtattaggtaccatggacatggcttatatttattttgaatttaatggtcacaatagctctgtgaagtagatatagctattcttgttttataggggaggaaactgaggcattgagaagtgaagtaatttcctacagtttcacagctataaaaaggcagggctgtcccctgaacctaggcatacgattatggggactgtctgggaactactgcttgagtcatgagaatgtagcgttggccttgctgagaaattcaaatgctgttcctgtcctttctactcttcttttaattggttttcaagggtgattacatgtgtggggtggccatgagtatttctcctccatgtggagatactgatactagaagagttcaagtgaattgataacataggtgaagccactaaaaaatgctttggccaagtcactgaatttgtgtgatcccaatcatttgtgataaggtcataatacttacatttaaggtatgcacaatgtctgctatgtggctgtgaatgaatgattttgcggtttcatcataaggtaaagcttggctgagagaagacagatctcctaggaatttcagcttttcaagttcaccctgaatttgtgggaaaatgataaaaatacaattatatgtcataatcttatttgaataactgtggagagtttttgaaaagtttcttggaatgctttaaatatctgacatctctttcaacccaatatcagtcttttattacaaagaatgagtaaattacggaagatttcagtgaaattccttgtccgctggccctgccttgctttgagacctcggctctcctctcagctccatgttccatcctggctttccccactcttagtctttgcttttctacctgcctgtcctgtgtagtgttgcctgattaagcttcctaggctgggcatggtggctcatgcctgtaatcccagcactttaggaggccgaggtggacagatcacctgaggtcaggagttccagaccagcatggccaacatggtgaaaccctgtctctactaaaaatacaaaaaagtagccaggcgtggtggcgcgtgcctgtgcctgtagtcccagctacttgggaggctgaggcacgagaatcacttgaacctgggaagcggaggttgcagtgagctgagatggtgccgctgcactccagcctgggtgacagagtgagatcccatctcaaaaaaaaaaaagcttcctaaaggtgacctctctgattctgttacttctagttctttcaatgtcattaaaaattcattattttgcttttaaaatttcctattaaaatccaagttctgattggaagaataaaatctctcagtactaacattctctttttcttttttattttattattactattattattattatttttttgacatggagtctcgctctgtcacccaggctggagtgcagtggcacgatctcagctcactgcaacctcaacctcctgggctcaagcaatcctcccgcctcagcctcccaactagctgggaccacaggcacgcaccaccacgtccagctaattatttgtattatgttgcccaggctggtctcaaactcctgagctcaagtgatccacctgccttggcttcccaaagtgctgggatgacgggatgacaggtgagaaccaccatgcctggcctctctttttctttttctttttttttttttttttttgagatggagtctcgctctgtcacccaggctggactgcagtggtacacctgggttcaagtgattctcctgccacagcctcccaagtagctgggactacaggcatgcaccaccacaccaagctaatttttgtatttttagtagagatggggttttatcatcttggccaggctggtctcgaactcctgacctcagatgatctgcctgccttggcctcccaaaatgctgggattacaggcgtgagccactgcacccggcctcttttctaattatacatacatacatatatatataaaattcctatttatcatagaaccttttttttttttttaagacagggtcttgctctgtcatccaggctggagtgcagtggcgtgatcaccactcactgcagtctacatctcctgggctcatgggatccttgtacttcagcctcctgagtagttgggactataggtgtgcttgaacctgggagacggaggttgcaatgagccaaaatcgcgccactgaactatagcttgggtgacagagcaagactctgtctcaaaaaagaaaaaaaaaatctctatatatcttaagacttggagaatgcgtttgctcctgaagcagggtccagtgtcctttcttttttttcttttgagacagagtctcaccctgttgcccaggctggagtgcaatggcatgatcttggctcactgcaacctccgcctcccaggttcaagctattctcctgtctcagcctcccaagtagctgggattacaggcacctgccaccatgcccggctaattttttgtatctttagtagagatgggggtttcaccatgttagccaggctggtgttgaactcctgacctcgtgatctgcccaccttggcctaccaaagtgctgggattacaggtgtgagccactgcgcctggctggtccagtgtcctttctaagtgtatctacaaaccacatgaataaattgctatcacagcacttgcgatactctgacataatgaccttcttattaatctatttccctgactgactgtggaatcagctcaaggcaggtaatgggcttttttgtttcaattcatggcagcaatccaagcccttcattaactacaaagaaatcgaaagaaaaccatgctgatatgaagtataaggattagctgaagtcaaaagtgaaggccaacatgttggctttaaatgttttatttttatttttcattggtattctacataaagaaaatgtacagtttggtggattttcacaaaccaaaaaacaccctgtagccagcaacagattattactagcattcctgaagtttccctcatcctccttccagtggaggctctgtgtggttttgtgtgtatgtgtatgtgtgtgttttgtgtgtgttttggtaaattgacaaattatggttgtatatatttatgcggtacaaagtgacaacatgatttttaaaaatgtatcatacagtaaaactgatttcggcaggaagcatgtggttccatgtgttataacacacacatacacatgtgtaaccatcaccacaatcaggatacgaacagttccaccatcccctaaatttctctcctgctatccctttttagtcacatcctctccccaccctaatgcctaggaatcactaatctgttctgcatcaccatgttttgtcttttcaagaatgtcacacaactggaatcatacagtctgtaaccttttctgattggtttctttcactcaacacaatgcctctgcgattcatctttgctgttgtatcgatagttccctcctttaattgctgaatagtattatattttttgagacagggtctcggtctgtttgtggcccagtttgtttatctgtgaatagtctttaatcttactactccaacttcttccctgcgtctagcatagtgccttataaatggtagctgttcattcattacttgttgattgggtgaatgggatttaaaagccatagaggaccaggcacagcggctcatgcctgtaatcccagcactttgggaggccaaggcatgtggattgcttgaggtcaagagttcaagacctgcttggtcaacatggtgaaacccatgtctactaaaaatacaaaaattagctgggcaatggtggcacgtgcctgtaatcccagctactcaggaggctgaggcaggagaatcacttgaacccgggaggcagaggttgcagtgagctgagattgtgccactgcactccagcctgggcgacagagtgagacactgtctcagaaaaaaaaaaaaaaaaagtctaaaaaaatataaaccaaaatgtcagcagtagttatttgagactggaattagggaagattagcttttaatttttattatggttttctttgtttttacattaatttcataattatatatgtaagtataatttataaatatatgtaaatatatgtattataaatataaaacaaacatgttttataacctataatataaaattatttgtataatcaagaaataatatgtttaaaatatttgttaaaatggaggaataagttggataactcataaaaattgcttgtgcatacctttagctcaccattgaaaaccttctggatggactggatcagtttctcaacaatggcctcactgagcgggtcctgttgggtcaggtgtctggggctatgtgacaggggctcacaatggagtccagggatgtcagggatgtccaagtctaacattgaaagaaagacactggatgatgcctccgtactgtgtaaagtgataaggtttagtatggagtacctctggctcacctttactacttgctctatgaccttaaccaagtcccatcctgtctcctagactcagttttctcaaaaataaattcaatgttctctaagggcctcctaagctacaaaaaacctttgggactgagctgtagcagaatggttaagactatggactttaaatctcaatttgagactagtttgaatcttggctctaccacttactatttgtatgacctttatcaagctagtttgcctcctgaaacctaagtttccttttctgtaaaacagggttattataagaattaaatgaggtaatacatgcaaagaactgatcccagaagtatttcccccttaacacatctttcatctgaagatttttaccattcttttttttttttttttgagacaagagtctcactctgtcgctcaggctggagtacagtggcgcgatcttggctcactacaacctctgcctcctgggttcaagcgattcttgtgcctcagattcccaagtagctggaattacaggcacacgccaccacccccaggtaattttcgtatttttagtagagatgggatttcgctatgttggccaagcaaggtctcgaactcctgacctcaggtgatccacccgcctcagcctcccaaaatgctgggattacagatgtgagccaccgtgcccggccaccactctacttttgcattctttttgatttcttgaatgcctcttcagtaaactctacccacttcctgccatattcctatcatccactaattgcaataattgaagccatgttctcattctgatctgtgcacaggctgttccttctgcctgcatttttctccttcttctcccccaccttcccttacctatctttgccttgctaactcctactcatccttcaagtctcagctccaggatgcctttcgtgtatgccctttttgcctattttggctaagtatccccaagtcactaataaaccgctctgtatccactctggctctcccacccccatcacactgattgcactgagttccatttgcctgttcatccgtaggtatactgtgtctgttctgttcgatgctatatctccagctgctagattaagcttagagcacaggagggcttcattaagtatttgctgaatgaatgtatgaatgaatgaaggtagcttcaaacacaccaggatctttcctgtgtcatgcacatgctgtccccatctatctgtagtactccctatactcacatgagttactctcacatctttcaagcctcctttagatttaaatagcactcatggtctcatacaggtgttctctgacaaccagagtttcaagtaggttcctattgcccttatttttgtctcagcctgttcttccatactgcttactacaagttgtagttacttcagtgactgtttactctttttggtctcttttctgcacaataatgtaagttctatgagggcagtgaccatgttggtcatgtctactgttgtattcccagctcctggtactcaatacatgttttgtagaatgaaagttattctgaagcccaatccagatcttaccttctgcataaagtcctcccactccaaggtatcccacactgccctttccctcctcagaatccctcaagcactcacactcttctgcagaactgtctcaggaccaaccttagtttcctggacatcacgaaccatgtatctcattttgccaactgtatttcaaggtctcaaagtcagggaccaaattcatcatcaaagtctagtcaagggctggtcacccagcaagtactcaatcaatacctcttggcctgagttgaaaatacattctcttttcccctcccctcccctttctagtcctttctcctttttacctgtcagttcaatgctacttgagccttttttaataatctctaagttgctcagctccaaatccacactttctgaatcactgtcataggcacaggggatcactacttcttcctgactacagatcctaggaataaagaggagatgcgaaaaattagttttccaggactgcttctgtctcatcatttatttgaaagcctcaatgtcactttctgagagaggcatttattcatcaccaatctagattaagtagctcccaccatcctggccccacagttaccttcttatttttttcatggtatttaaccaccacctacaattaccttgctcatttggtttatttgtttgactgtctcctatcagactataaactccattagagagaaccctcgtctacatggtcacatttgtatccccaatacctacctagcatgttgtcagtctcattaggagtgaatggataggtaagaaatactatgctgctgttaaaaacaatgctgggtgcaggtggctcacgcctgtaatctcagcactttgggaggctgaggcgggcagatcacctgagatcaggagttcaagaccagcctggccaacatggcaaaacctggtctctactaaaaatacaaaaaatagccgggcatggtggcacatgcctgtaatcccagctactcgggacactaaggcaggagaatcacttcaactgggaggtggaggttgtagtgagccgagattgtgccactgcactccagcctgggtgacatagcaagactccatctcaaaaaacaaacaaacccatcaaaaaaaccagattgaggtagaacacctcaccaaactccctctatcttccttaccctttcctactttttctttttaccatagcacgtaacaccttccaatatatctttcacttgtttatgatgttcattgtcatttatttcctcctgctaaaatgtaagcttcatgagggcaagaatctttggctgctttgttcatgaatgtatcccaggagtctagaacagtgacatacagaagtgctcaacaattattggcagagtaaatgattgagcaggtctctatttactgaatgtttagcatagattcatgaaagaaaaagcaagctgtcaaacaatggatatgacatttttcattaaaacaaaactattttcacaaaagtataagtatatgtgtatacacacagaaacacacacacacaaatgttggcatacatgaaaaaaaacttatggaggctgggtatggtggctcactctgtaatctcagcattttgggaggttgaagtgggaggactgcttgagctcaggacttcgagactagcctgggcaacacggtgagacctcatctctacaaaaaagtaaaaaattggccaggagcggtggctcatacctgtaatcccagcactttgggaggctgaggagggcggatcatgagttcaggagattgagaccatcctggctaacagggtgaaaccccatctctactaaaaaaaaaaaaaacaaaaaaattagccgggcacggtggcgggcgcctgtagtcccagctactcgggaggctgaggcaggagaatggcgtgaacccgggaggtggagcttgcagtaagccgaggttgcaccactgtactccagcccaggcgacagagcgagactccatctcaaaaaaaagaaaaaaaaagtaaaaaattagctaggtgtggtggcatgtgcctgtagtcctagctactcaggaggctgaggcaagatgatcccttaagcccaggagtttaagactgcagagtttaagctatgatggcaccactgcactccagcttgactgacagagagaacttgtctctagaagaaacaaaaacacaacttacggaattcattttttaaaattatttattatttttaatttttattttttttgacacagagtctcactttgtcgctcaggctgaagtgcagtggtgcaatctcagctcactgcaacctctctgcctcctgggttcacgtgattctcatgcctcagccttctgagtagctgggattacaggtgcctgccaccacgcccggctaatttttatatttttagtagagacagggtttcgtcatgttggccaggctggtctcaaactcctgacctcaggtgatctgcccactttggcctcccgaagtgtggggatcacaggcatgagccacggcgcccagccaataaaacaattttggaaggacaccccaaaccaataaagtttgaactctgtcctgtatgcatatatttctttaataaaaaatgagttcattaaaaacaaagaaaccctctaggagcagaatggttgggttgtgtggtagattgtgtaactgacttcttaagatgctgcctggccacgtgttgtgtctcacgcctgtattcccattgcctttgggaggctaaggcgaaaggattgcctgataccaagagtttgagacaagcctgggtaacatagcaaaatccgatctctacaaaaaattagctgggggtggtggcatgtgcctgtagtcccagttactcaggaagccaaggcaagagggtcctagagtccaggaggtgaaggcggcagtgagctatgattccatcactgtattccagcctgagcgacagatggagaccttgcctcgtaaaaaacaaccaccgccagtggctcacgcctgtaatcccagcactttgggaggctgaggtgagtggatcacttgaggtcaggagtttgagaccagcctggccaacatggtgaaaccccgtctctactaaaaatacaaaaaaattcagccaggcagtgtggcgcgcgcctgtaatcccagctactcgggaggctgagacacgagaatcgcttgaacccaggagatggaagttgcagtgaactgagattgtgccattgcactccagcctgggtgacagagggagactttgtctcaaaacaaacaaacaaacaacgaagaagctgtcaatctgtttccaaaatggtcgtaccactttacatttccatcagcaggatatgagagatcctgttgctccacatccttgccaacatttgctattgttggtctttttctttttcattagtcaggtgtggtggctcccatctgtggtccacagctagtcactaggaccacagatgcgagccaccacacctggctaatcaaaattttttttttgtagaggcaggtcttgctgtgttgcccaggtgggtctcgaattcctggactcaagtgatcctcctacctcagcctcccaaaagctctgggattacagactgagccaccattcctggctgcatatgctaagtctgtggtgtaaatactcccatcatggccaaaatcaagctaccaatactaccttgggaagagatgttcaatggcatactgtcatatatttccaccacacagttacaacagatataagcaaccacaaaagcacacaaaacgtaaaatgtagtgaaataattagaaaataatgagttttgttttcaatatactttatttcatcctaaattgatataattttctaaatggctgtatttaaccaatttgcaaaattactgcaaatttaacaatggactctcaagatagtatgagacagctccagcacaccactggttggttgtcttattcttgagctgggagaattctttatatattctacatcagcactgcccaatggaactttctgcaataatgaagatgtcctataattttgagtggtccaatctgatatccactagttatctgtggctactgagcacttgaaatgtggctagtacaaatgagagactgaattttaaattttacttaattttaatccatttaaattcaaatttaaatatccacataaggctagtggctatcataacagacacagaaagaactgactctctcccatgcgggataacatttgggacaataataacgttaataagagttatattgtgcatactttatatgttcataaaactgtagttaaaagcacagattctggagtcagctgcctaggttcaaatctgtttccttctctttaaaatgggattagcctgtaatctcagcactttgggaggctaaggccgaaggatcctttgagcccgagttccagaccagcctgggcaacaaagcgagacgcggtatctaccaaaaataattttaaagattagctgggcgtggtgtcgcaaggcagcagtcccagctactccggaggctgaggcgggagggaagattgcttgagcccaggatgtcgaggctgcagtaagctgtgatcgcaccactgcactccagcctgggcgacagagcaagatcccgtatcaataaaaaaggaaagaaaagaaataatgcttgtagagcgttcggcacagtgtcgggttatactgtaaacattcagtagttggcgctagttattagagcggtgttcctggatgagccacctccatgttgagcctgtaaaactggcctaatatgttctctatgagtcactgcattgctctgcaaatcagataaaacgtcactcgtaggtcagttattaacaaccccactgataatctttggaaaaaactgacataattttctttttcttttttttttggtgagacggagatttactcgttgcccaggctggagtgcaatggcgcgatcttggctcaccgcatcctccgcctcccaggtccaagcgattctcctgcctcaggctcccgagtagctgggattacaggcatgtgtgaccacgcccggctaattttgtatttttagtagagacggggtttcaccgtgttgcccaggctgatctcgaactcctcacctcaggtaatccgcccgcctcggcctcccaaagttctgggattacaggcgtgagccactgcgcccggccagaaactgccacaattttctaaagaggaaaaaaaaatcccttctaagctatcccctcccgacgagacccttcctgttcctttaaaatgggccgggcagcagaaagacgagtgagtgacagcagacaggccaatcagaagcggccccgtctcgggcccaccccgaggcctggcccaaccgcgtcccggtagctcccggaataggagcgttgcgagacggtcggttccaagtgggcctgggcgcgggggagaggcgggtctgtcctcgggaactgcaaggccctgtgagcgggaggactgggatcccggccgcggctgctggaagcgtcgaagctcagcggggccgcggacactgacctgtgcttagaactcatcctggcccgcagagcctgccgcgagtccctggcgtcccctgtggcgggctcttggagccactttcccgagcggaagtcagcccgcggctcggactccggcgggacctgctcggaggaatggcgccgccgggtgaggagttgcgcgtggctttggggagagggctgtcgcccgcgggaggttactagtcgccgctcgagagccggccaggcgggatccccttcccctgcgggacaggggcatgggcacaagctctggctggggcgctctcggatcgagggtccgaaggagggctgcgagctggtgggagtgcccgcgacctggcggggttggtgcctgggggaggggtgcagcgcggagctacgggtcgccccgaggctcagccgtggggaccgcggacgcgcttagcctaggtctggcctcattcatttcactcgcgcgggcttctgggccaggcggcctaaggttctggtcccggcgctgccccttactccgtgtgaggttttgggcagattgtccttctttgtgctgtagtttcccattcagtgaaaggggcaaagaaaaccctcacttctctctgggagcctggagcataagttctcaagtgacactctaggtgcaaacttgcagtcggccacgtattcattgtgtaacccaaagcaggttacttaacccctctacacctcagtttctcatctgtaaaataagttagtcaaattagtcacgttatctgcctcgttgagttgctttattaagtgaaataatcttcgtgcttagtttagaacagtgcatggccctaggtaagaactaagttaactgcattggaagttactgagtagacgctgtgcagggtggaatttcatgtagcctcatcgtaactttggaagcatgtactcttgttactaccatttgacagatgagaagttggaatcccacggaagggaacttacttgcccagggtgacacatgaatgagtcagtggctcaccgtttcattatttgagaagttcaggatagtaaagtggttaaaagcagactttggattcaaattgcctgaagtttgattttcagtgatgtgtcctagggcaggtaactacttctgagccttactttcctggtctgtgaaatgcagaaaatagccaccttgcttagatgttgtgaggatttaatgatttggtgtgtgcaaagcacagcatagcgtgggcatacctaacatattaagtgctcaacttttagtcagaaaagttactgctctcgttaacatggagtgagaagattaggattctgacacaggtgctgttttaggggaatttacggtctaggtgggaaaatgctagtcgcagccattcactagatcttcatatattgggtacccgcctgtgcacaaggcattggggattcagcattagtatcttgactccgctctctcttaggtctttctgtccattagcagtttctgataggctttgactttgaattctagccagactaactctcatcacttctcatcatgttcactgctgttgccctggtttgggccaccatcatcttctggcttggattatggcggtagtctcccaactggtgtcccctgctctgtccttgcacctgcatggtctgttctccacacagtattgtttattctcaacacagtaataccattagagtgtaagtcaaatcactcctctgcttagaactttccagtggtctccagccgggtgcggtagctcacgcctgtaatcccagcactttgggaggctgaggcgggcggatcacgaggtcaagagatcaagaccatcctggccaacatggtgaaaccccgtctctactaaaaagacaaaaattagctgggcatggtggcacgtgcctgtagtcctagctacttgggaggctgaggcaggagaatcgcttgaacccgggaggcggaggctgcagtgagccgagatcgcgccactgcactccagcctggcaacagagcgagactctgtctaaaaaaaaaaaaaagaactttccagtggcttccactacggtggtatacaaggccctctggatttgtcctctgctacctctgttacctcatctacttcttaccctttgcttattccactcaagctgtactgtccttgctgatctcaaaaaacactgtatgtgtacatactcctgattcagaatgtttgcatttggtttttcttttcttttttttttttttttttgagacagagccccaggctggagtgcagtggcacgatctcagctcactgcccactctgcttcccagatcaagtgattctcgtgcttcagcctccctagtagctgggattacaggccaagtcaccatgtgcggctcatgttttgtatttttagtagacatggggtttcaccatgttggccaggtttgtcttgaactcccgacctcaggtgatccccctgccttggcctcccaaagtgctggggttagaggtgtgagccactgcgcctggccatattgggtttttcttcttagcatagtttcccaccagatatctttatgacttgcttcttcttcagatctgtactcaatatgtttatttcttagtccttcatagactaccgtatttaaaatgcagcccttcccaaatatctcttctgtactttatttttttccatagcacttactttgtaatgtgataaataatgttatttcatgtgatgtcttttgtcactagaatagaagctctttgagggtgggagttttgtttcttttgtttcctgctgtatttttaacacctaaagtagtgtgtggcacatagtagctcagtatacatttgatgaatacaccacgtgatagattttttctttttttaatttaattttatttatttatttttatttttttgagatggagtctcactctgtcacccaggctggagtgcagtggtgcgatctcggctcactgcaacttccgcctcctgggtttaagtgattctcctgcctcagcctcccaagtagtttggattacaggcacccaccatcacacctggctaatttttgtctttttagtagagacagggtttcaccatgttggccaggctggtcttgaactcctgacttcaagtgatccgcccacctcggcctcccaaagtgctgggattacaggcgtgagctactgtgcccagctgtcttttatttttttgagacagggtctctctttctcacccagggtggagtgccatggtgtgatctcagctcactgcagtctcaacctcctgggctcaagtgatcctcctacctccgcctcccgagtagctgggactacaggcacacgccaccatgcctggctaatttttgtattttcttttttgtagagaaagggtttcgccatgtcgcctggtctagtcttgaactcctgggctcaagcatccgcctgcctcagcctccccaagtgttgggattacagaagtgagccagtgccgctggccaatagtgccttttttcaaggattctagttcaagcttaatttaacactaaaggcaaaggatttagggccactcatgttagcctagtgattatttgttactgctgttacttgggtgccagacaatgcactttatcaagaagcagcccattcaaaagtgttttttgttttgtttttttaaataaatgaagtagaaatgtaccactcctgcagcttcctgtcccctggggcatcatagatggggattaatttttcttttcatttattcagcaaatatttattcagtaactatgtgccaggcagtgtgcaagacttggaaatactgggatgaacaaaagaagcagtctttatcctcatggaacttacagtttagcagagaaatcagacattacgctgttaaagttgtagaaaatcccacagagaagtacagattgctatgagtggatataagcacaacaataataatagtagtagaagtagtagctaacattgatatagcatttgttatgtgccagtcattattctaagatttttttttttttgagacggagttttgctcttgtcactcaggttggcaacaatggcgcattctcagctctctgcaacctcttgtctcccaggttcaagcgattctcctgcctcagcctcccaagtagctgggattacaggcacctgccaccacacccagctaatttttttgtatttttagtagaggcggggtttcaccatgttggccaggctggcctcaaattcctgacctcaggtgatccacctgcctcggcctcccaaagtgctggcccggccagatctttctgtattaactcgtgtaattgtacctgaggtagatactattatcactttacactttaggaaactgaggcaccagctggttgaataactgccaagggcacattgctaataaatggcagaggtgtgatttaagcctggccccagagtctgggttcttccttacattattgtactggggaactaatcctagggagagctgcttaaggaagaggtgcttgagctgaattctgaaagtaaaaattaagccaagttgaggtaaaaacatggaaaaatgctgagcaggaaagaacctggcttcttagaggacagagaagaagccagagagcaacagatagcgggaagcgcgagggaggagatctggttgagaggctggcaaggtgtgaggattcaggattgggtttgtccttagaggcagaggacttacagacatctttcagatgggaatagtaggataaggcctgtgctttagatgcttggaggctgctgggaggactgtccttccaccagttgaagagcaggctccctgccttcccaaggcttctcctcaggttaaacccctggattccctcgcccttccccatgtgatttggttcccagatcttggtgtgcatcatcattgggactgtgtatagcaccttggaagagtgtagagtgtactgaatggttgtttccccccaaggttcaagcactgtcttcctgttggccctgacaatcatagccagcacctgggctctgacgcccactcactacctcaccaagcatgacgtggagagactaaaagcctcgctggatcgccctttcacaaatttggaatctgccttctactccatcgtgggactcagcagccttggtgctcaggtgccagatgcaaaggtaaggctgcttttgtcctggtggtcagggtggttcaggagaaccttcatcccctcactatattcctttggggtagttcaaaactaactcttgctcatttgaggataaccaaggttaatccaatataagaaatatttggccaggcgtggtgactcacgcctgtaatgccagcactttgggaggtctaggcaggtggatcacgaggtcaggagttcgagaccagcctggccagtgcagtgaaaccctgactctgctaaaaatagaaaaaattagctgggtgtggtggtgcatgcctgtaatcccagctactcaggaggctgaggcaggagaatcgtgtgaacccaggaggcagaggttgcagtgagctgagatcccgccattgcactccagcccaggcaacagtgtgagactcagtctcaaaaaaagaagtttatttcagtttgacagatctgtttttgtttttgtttttttgcctaatgtatgttaaggatcataccagatcagttatttttagtgggatgtcaagaagagcaagcatagatcatctagaaacttttacttcagctctgggagtgagactgtccaataacacatgtacttactaagtgcccccctatgtgtgtggctaataataagggaattcaaggtggaaggcactcacatgtattaaataatggtagtcactacatcaggcaattttgatacatgtttttggacttctggtgaggaaaatgcattatgattaaaacctttcctggattcgggacagtctttttttttttttttttgagacagagtctggctcacccaggctagagtgcagtggcatgatcatggctcactgcagtctctgtctcctgggctcaagccatccacctcagcttccctagtagctgggactacaggtgtgcaccaccatgcctggcaatttttgtattttttcgttagagatggggttttgccatgttgcccaggctggtcttaaactcctgggctcaagtgatccacctgcctcagcctcccaaagtgttgagattacaggtgtgagccaccacctgaccaggaacagtcttaaagtgaatttacattttattcattatagtagtatggacaactagactaaacaattttcctttgccaagtttctcatatctgccttagttttctttgactgaagaacaaattaccataaatgtaggggcttaaaacaccaccgacttattggcttatatggcttatagttctttattttattttatttaagagagggtctcactgtgttgcccaggctggagtgcagtggctattcacaggcatgattatagcacactataacctcgaactcctgggctcaagtgatcctcctgtctcagcttcctgagtacctgggactatgggtgcatcccaccgcaccccgctgttagctgataatcctgcaggtcagaagtctagacaggcttgcctgggccctctgcttagtgtctcctgaggtcaaagtgaaggcattggccaaactgggctcctcccggaagcactggagaagaatctgcctccaggcccattcatgttgtcgtattgtcagcaaaatccagttcctgtggttgtgggcctgaggtctccatttccttgctagctgtctgctaggagttgctctctgttcctcaaggccattggtatttcttctcacatggcccctccacctttaaaccagtaatggcatggtgagtccttactcttcaattctctctgacttcctcttcagccaccagccagagaaaactgctattaaagggttcacctgtttgggtcagcccacctggataatctctgaattgtaaggtcagctgacttggggctttaattatacctgcaaaatcactttataacagttcctaaatttgtgtttaaatgaataatcagtggatggaaatccagggggaggagtatgaatgtctttagaattctgcctaccatttcttgtattagcatggaaatgactccaaatctgtagggactttaggcatacactactgcacctggcttgctggatggagtgtcttcaagcaaatatcagacatattgttgtacttgtatctcttattctatttatttatttattttgtagagatgaggtctcgctatgttgcctaggctggtgtcatgaactgacctcaagcaatcctcctgccacggcctctcaaagtgttgggattacaggcatgagccattgtgcctgaccaacagtaattctttaatgtcatttaattctcagtctatgttcagttatcttgagttatctcaaaagtgttttttacagttagttggcttaaatcaggatctaaagaaggtctacacattccattttttgctggtatctcttaagactcttttcaccgataatagttcccattccctcttttctccccataccatttatttgtggaataagtcaggtcatttgtcctggaatattttccacattctgcctttgattaattgtatcttcatgatgtttttgaacatatttccctatcctttgtatccctgtaaactgatagttagctcttgaggctaaattatattcagggttggttttcttggtgaaaatatttcacaggtggtgctgtggacttcctattaatagatacataatatctggttatttcacttttagtgatgatgaagttgtaaattaaggtgttgtcagactaatctatcgcttataaatagtatatagtagggatttgttttttcatccagtctgataatttctaccttttgattggggagtttattccatttatttttttattttgattctttttttatgtttaagatcaatcatttggcggggcgcggtggctcaagcctgtaatcccagcactttgggaggccgaggcgggcggatcacgaggtcaggagatcgagaccatcccggctaaaacggtgaaacaccgtctctactaaaaatacaaaaaattagccgggcgtagtggcgggcgcctgtagtcccagctacttgggaggctgaggcaggagaatggcgtgaacccgggaggcggagcttgcagtgagccgagatcccgccactgcactccagcctgggcgacagagcgagactccgtctcaaaaaaaaaaaaaaaaaaagatcaatcatttatgtttaattatattgttgggtttacatctgtcatcttgttatttgtttcctattggcttacctgtttttccctctcttttcctgtcttatttttatattttattttgttttattttatttttttgagacagggtctcactcttgtcacccaggctggagtgcagtggtgtgatctctgctcactgtgacctctgcctcccgggttcaagtgatcctcccatctcagcctcctaagtagctgggattacagacgcgcaccaccatgcctggctaattttttgtattttttggtagagatggggtttcaccatgttggccaggctggtcttgaactcctgacctcaagtgatttgccctcctcggcctcccaaaatgctgggattacacgcgtgagccactgcgcccagccccttgattatttttaaatattctgttttatatcttctattgactgttcagatctaatttttttttagtgtttgtctagttttgtttagagattttaatatgcatccttaatttctcacggtatatcttgaattattattttgccatgtcacaaatagtaaaagaaccctataactgtatttgcatttaaactctcatcatttctgctatcattgtcatactttttgtttgtttgtttttgtttttgagatgaaggcttactctgttgccaagctggagtgcagtggcgcgatcttggcccactgcaacctccgcctgctgggttcaagcgattcccctgcctcagcctcctataggtgcacgccaccacacccagctgattttttgtattttggtagagacgaggtttcactatgttggccaggatagtctccatctcctgaccttgtgatctgcccgtcttggcctcccaaagtgctgggattacaggtgtgagccaccgcgcccggcccattgtcgtactttttaaccttctttcaaggatcccagcctttgctgtctgttgttcagtgtctcaatttcatatatttcatacagttttatagttatttttggtaggaagggaagttcaatatatttaattctgtcaagggcagaattgatagtcccaattggtgtctttttttttttttctgagacaaggcctcgctctgttgcccaggttggagtgcagtggtgcgatcatggttcactgcagcctcaaacttctggactcaggtgatccttcacctctgcccctcgagtagctgggactacagtcacctgtcaccatgcctagctaaattttttttttttttaatatttgtagagacggtgttgccatgttgcccagggttgtctcaaactcctcgggtcaagccatcctcctgcctctgcctcccaaagtgctgggattatggacatgaaccactgtgcccagcctccaattgatgtctttttttgttgtttgtttgacatggagtcttactgtcatccgggctggagtgcagttttgtagtcttagctcactgcaacctccgcctcgtaggttcaagtgatcctccagcctcagcctcccaagtagctgggactacaggcattctccaccacgcctggctaatttttgtgttttttggtagtgacaggattttgccatgttggccaggctggtcctgaactcttgacctcaggtgatccacccgccttggcctcccaaagtgctgggattataggtgtgagccacccctctcagcaattgatatctttcaatccatttcaattgttatcctttttggtgctcaaaatgttccatttttgccaatgggccaaactgtgtgtgtgtatgtgtgtgtgtgtgtgtgtgtgtgtgtgtgtgtgtgtgaacatccattcatttacacattgggtacaactggttttcagtttaactgtagagttaaatagttactagactggccagaaagcctaaagtatttaccaactggtcctttacagaaaaagtttgctaatcgcagctatatgagatccagcttactcaaattttttcctgacaaccagctctccgtttctgcccaatgttttcttcctgtgtgtgactctattaaagatacagacgtttcctcatgattacactcttataaaccctaaaggtgaatgtacctcctgataaaattagttctgctcaaaagtaagagtatacccatcagagtcagttaactcaagcttttaattctggctccacctctctgcaaagggagttatgaagcctacctcactgaatcattgtaagaagaaagtgaaattacagtatgcccctcaaaggaaatggtagctattatcgttcttacattgaaaaggtttgcttctatttatactttgtttaggtgagttcagacaatgcctggcacagacactgtattcgcagtgccttttgtagtgatgcttcgtacttctgctctggtttttggtgatgtctttagaggccctggggagagagaaagagcaaattgactagaggttttgtattgtgaggtataggagataacattgaaatagtaatgttaacctctggcaggatttgaatgcaggatgaaaagtttctcctgaaggttttcaaacttttgtggaaccacaggattcggtgtagggggtcacggaggaatgaggtgctcccacttcatccagagcatgtcttttgatctgtgtcgtgatttggagttctataggagatttaggttgaacacatacccccaaagctattctctgccatcatcacaagtttgcgggatgttggttagggctgaagatgtagattgagaggcatccggccagctgccatgcagtgtgacttgggataattacatgattgggctggctgtggctttatgtttacaatacagacgctgaagtcagagtggttgccttcaaggtgttaacttcaaaacttcacacctgagtcacctgtgcagcttatttaacctttcaaaattgttgttctgtcatcggtaagatggagataataatactcagctcacagataatgtgtgcagggtagttagcacgttgatggcatgtggtaatacgtagtattacccttatgagtagtatgactatatataaatagtagtagcagttggtacacattgattgacatttttttttcagactgtcatcctcactgcttagcatacatctgacacacgggtgtctaacaaatatttgaactgtagactttagctcaatcaaaatgggagctctctaaatgtgcctgctaatcagaaaataaataggttaatcacatactccattctaattgcttatgaaatgtgctgtgttgattaggtggtgtgtgcattataagtaatggaagaaagggagttgtatgcatgtttcagagctgttgaatttcctcattagatgtgcaaactacataaatccattgagagatttatgtcattactgtcacttccgtgtagcggtgcatgtcctgctcagctgttgctgccttcagctcagtagagagaactccctgggctcccctagatacactgttgcctattctcacagatcgatatatttggagagattttggttattatctcgtaagaggttttagcagcaaaactgggagaaatggggtttaatgagaatagaaactatggagacagcagtgtggaatgagagttgattttaggtgttataaagtgtgagcatcggctgggtgcggtgtctcaggcctgtaatctcagcactttgggaggctgaggttggtggatcccttgaggtcaggagttcgagaccagcctggccaacacggcaaaaccctgtctttactaaaaatacagaagttagctgggcgtggtgggcatgcctgtaatcccagctactcgggaggccgaggcaggagaattgcttgaacccagaggcagaggttttgcagtgagctgagactgtgctgctacactctagcctgggtgacagagcgagaccctgtctcaaaaaaaaggccaggcgcggtggctcacacgtgtaatcccagtactttggggatgccgaggcaggcggatcacgaggtcaggcaatcaagaccatcctggctaatacagtgaaaccccgtctctactaaaaatacaaaaaaattagctgggcgtggtggcgggtgcctgtagtcccagctactttttttttttttgagactctgtctcaaaagaaagaaagagtgagcatttttcatttgagttatatttatataaaacataagcatgtcagaaaggtgattttacagatatcattatttagctttttacaagattaagaacatgctgggcacagtggcttatgcctgtaattccagcactttgggaggctggggtgggaggatcacttgaggtcaggagttggagactagcctgggcaacatagtgagacacccgccccccacccccgatttctgcaaaaagtaaaattagatgggcatggtggcatgcacctctagtcctagctatttaggtggctgaggcagaaaggcagggatattgcttgagcccaggagtttaaggctgcagttagctgtgatggcaccactgcagtccagcctgggcaacaaagcaagaccctgtctcaaagaaaccaaattactttaaaaaaatgcctcccttataaagcgttgtgagcattaaatgagataataagtgtaaagtgcttagtgtagtgcctggcacatgatgagtgcatatagtagtaagtatatttgtttgtgggtcaggcactagttcattcctggggatagcagagaatgaggcaatccttcacgcagtaatcatttatggagcatctgctgtgtgccagacattgtgctaagtgcagagaagacaagagagctcattatccattgagagtaccataatacagtgctaagtgccaagaggcagacaggctgtttgtggaaagtaccatgggagtccagcagagggagccggcactcaccctgtctgccaagaaagccacaatcttgcactggagtgctgccatctgtgctggctgctgcaggcttcatttggtcactcagcaaatatatagtgagtttctgctgtgcactaggtatagtgctaggcactggggatttactcttgagccataaagagggagagggcccctgcactcttaagaatatgttgtctaatagctgagacaggcattaatcatgtaatcaaatacatgcacgaatatttgcaacaatggtaagttttatgaaggggagatatgtgctgttataaataggggattttataggggtagaataggggactttgatttgccaggaaaggctttcctgaggaaatctccgaatttaaatctcattgtgggctgagtgtgttggctcacacctataatcctagcactttggaaggctgaggcaggaggattgcctgaagccaggagtctgaaaccagcctgggcaacaaaatgagaccctgtctctacaaaaagtaaaaaaaaattatctggtgtagtggtgtgtgcctgtagtcccaactactcaggaggctgaggatggaggatcgctggagcccaggagttggaggctgcagtgagctacgatcatgccactgcactccagcctgtgtgagagggcaagaccctgtctcaaaacaaaaacaaaacaaaccccaaacccaaaactcaaacctctctgcatcaccctaatctcactctactccttaagggcagggactttgtctattttatttgttgtgtatccccagttcctagaacagcacctggcatgtggtaggcactgaagtgaaggaagatgtgattgatctgaattctaaagggagaggaggagttaactgtgagacgaaggagagaagggacttcaggcagaggaaacagcctgtgcggaggatagagagcaggttacatttgagattgaaaggaggaggtgtgtggaacagagtgggagggagggagaggagtgaggcaggctggggccaagccatagtgccttggcccacataggaagagttctgatctgtttccaatgagcaatatattttaaatagctagtatcgtgattcaccttgcattttggaaagacttctctcttgctttttggaagacagactatagcagggggctacagggcaagattgaatgcaggaggggtacaaaagataatgcctggactttctgcttctgctgcatggatgggtagttgggccattccatgagatagcaacacaggaagacaatgaggtttgtctgggaaagatcacgaatttggtctttaccatggtgagcttgaaatacctttgagtcatgtaagtggctgttgagagaagtctgggctggaggtacgggtctgagaattatctgcatagaattttgggatgaagccatgggcatggatgggatggcctagggaggcagggggtggtgggatgagagccaggcctaggagctgagaaacagcaggagagctcaaaactgagggaggagctgccagagaagtaggagacccagcagggtgcggtggcatcccagaaggctacgggcgcgcatgtttcccagtgaggacgtgatcggtctgtccattgttgaggagtgagcactggaaaatgtcctctgcttcgacaatttggaggttgccactggcctgctgggggcagaagccaaattggaatgagtggaggtgaggacatgaagactggagcagtgtggctgtgtgggaagagagaaggtggcactggaggggagagaagggttgagggaaattgttgttgttgttgttgttgttgtttgaaagtttcgctcttgtcacccaggctggagtgctgtggctcgatctcggctcactgcaacctccgcctcccaggttcaagcgattcttctacctcagcctcccaagtagctgggactacaggtgcacacccccacgcctggctaatttttgtatttttagtagagatggagtttcaccatgttggtcaggctggtctcgaactcctgacctcaggtgatccacccgcctcagcctcccaaagtgctgggatcacaggcgtgagccatcacgcccagccaggaagttgtattttaaaataagtcttgagttttgttaatacattataggagaagttgaattgacgaggtaatgggcttccagatggagagacagggtgtacaaagcctggaggcttccaagtgcttgttgtgctttggggcagtgaggtgcttgtgcaactggagcagagatgggtggggaagtgcagtaggaagcacctggggaaaagcgggcctggttagaaagggtctggcgtggggccccagccagtgtgtgcctgggcagcacatcacagtaacaaagtctgaagagatgacaaagcacagtctgagaggcagccagagtagcggggagctgtttatggaggaaataggggaggggagggcagatgagagagatttgcggtcttttctataggcctccgtatttgattaggttcagggagttgtaggggaaaacctatgatggaagaaagcactggtgttctttgctcaagagggtgtttgattaattggggtattagcacagaaagttggaagcaagcagatcgggggtggacatttagggggcagttttcagccttcagtcgggaagatgagtctagaacgttggagggcagctggagtcagagtttccagtcccccgacagtagctggctgaagcctcagcactgggtgggctcactgagcaggctgagcatgttctgggaggtgtccctgcttctgctgctgtgtaaactccgccgtcaacatcttgggctttgaagccactgaacgccggactggtttaccttgatttgtctttgcaaagtgtaggaatgatgcttgtcttactccagaatagattgtttttagtgggctcttgagaagtggaggttttatagctcagacaccagagccaggctcttctggagccagggaattctagttcccctagttaaaagctgagtgactttggacaagttactttgcctttataatgcctcagttttcttacctgtaaacttaaggtgataagagtgcctgatccatgagatagattggggattaaatgagaaatgcacataaagcacttagaacagcgtttgacacattttaagtgctcagaaagaggtaatgatagaggtagaagtagaggtagtcattgttttggggtctccagtgttgtcgttccattgttaaagcaccagatggcgacaaagcacacattttcagctgccttgcattcccctgcttggactccttgagtagctttacttattctcttcagatccctaattgatgcaaagtgaagtattttgtttgtttcctttctctctctggcttctttaaaacttctggttgaaactcatttgttttgagactcttatttaaatttcattcataaaattaaaaaaatgctttggttggagtagcatgtacacacagtaaaacattggacaatacaaaatagctgttagtgaaaggcagcgtgctgcccttgccctccaccctgtcctactctccaggagcaccccgcgctttttttttttggtgggagaggagtctcactctgtcgtccaggctggagtgcagtggcacgatctcggctcactgcaacctctgcctcccgggttcaagggattctcctgcttcagcctcctgagtagctggaactacaggtgagcgccaccgtgcctagtctcccccccacctttttttttttgagacggagtctcgctctgtcgcccaggctggagtgcagtggcacgatcttggctcactgcaagctctgcctcccgggttcacatcagtctcccgcctcaagcctcccgagtagctgggactacaggtgcccaccaccacgcccagctaattttgtttttgtgtttttagtagagatggggtttcaccgtgttagccaggatggtctcgatctcctgaccttgtgatctgctcgccttgacctcccaaagtgctggtattacaggtgtgagccaccgcgcccagcctttttcttttttttgagacaggatgttgccctgccacccatgccagactgcagtggtgtaatcacagctcactgcagcctcaaacgattctccaacctcaccttcataaagtgttaggattacaggcgtgagccactgtgcccagccagcacccacttttaactgttattattaccacatctttttgaatagctgaattttatattacttcagccaaaatattggcagtctattgatttgatactgtttcttggagtcgaggagagtcgtagtagcgggggcttggcgattttgtgatgtgtttcctttgtgccagtcactgtgatgggcatttggcaaagtccctgatcttgggccactagtcactgggggaactagtaagtgcagtgtggtacgtgctttgggggagcacttgagagggtggatacctggcctctcctgggaggactgtcaggaagaggtgaacatctgagcagagttgaagataggacctggtttggcaggcaggaaggacaaggaaaaggtgctcccggcagggtgggtagcagggtcaaacacgtcaaatggcgagagcgtggtatagctgcaggaggctagagggtaagattttggagttggagttagggctatggtgatgcaggcagcatggagagggagggtcagtcttgagggcatttcatgctgtgtcagaagttggatcttgtctgagaaaaacagggaaccactgaagggttttaaaggtaaagcaacacggttacacttgtattttgtgaagatcagtcttgaagcagtgtgcagaatggattgcatggctttagaccgcttaggagatgactgactgggacaatgtaggtgagaaatggcaagggcctgctgtaaggcagtgacagaaaccagaggcgggactgggcctgagaaatgaaaaagaggtagacttgataggcttggagggtggggaaaagtcaaggatggttcccatgtttctggtttgggttgctggatgcatggtattacctgtgcatgagctgggaagtcctggtgaagaaatagaaggttttaagctcattttcttttttatttttatttttttgggggactgggtctcgctctgtctcccagactggagtgtagtggcatgaacatggctcactgcagcctcaacttcaagcagtcctcctacctcagcctcccaggtagctgggaccacaggcatgcgccacctgctctgctactttttgaattttttgtggagatggggtcttaccatgttacccaggctggtctcaactcctgagctcaagcagtcctgcctcagcctcccaaaggcctgggattacagatgtgagccactgcacccagcgttaagctcattttagatttgttgagcctgacttggccttggtgacatctaagtggagatgccagtaaagttggaatcagaagagactgccacttggtagctttgtcaccttcatcaggttacttgccaatttggagccccagtttctttttcaggtaaatggggatagtgataatctctaccaaaggatcatgttgttaaaaggaagagcttcctaaatacccagcacagtccatggccagacaggtgatccgggaagtggtttccttctttcctttctaaggttcggaaggactcaagcgccttcaggcttattgctctttgtacgaagtgagcaattttgggtaataccgtgtcctatggaaagtaactacttaactaaattcatgtagctcattccttaagccatctataatggctgagaatgttatctaaaaacgcctttgcttttcctggttcactacatgtgtcaccacttaacattgacttttccccactgtgtagaaagcatgtacctacatcagatctaaccttgatcccagcaatgtggattccctcttctacgctgcccaggccagccaggccctctcaggatgtgaggtgagtccgggttcctacgctgacaatgactttaactatttaaagtacatttttaaaggggaggagtcatgtcaaacatcctttttttaattatgagagtccattattgtgagtgggaattccattcctgtgattttttttttccttaagaaagtatagtttatgtttctcctaagtttttacttttcaagggttttaaataacctttttgtacagtttttgcttttcttctggtaggtcttgattttttcctttccatctgcctttaacacgtaaaaatgttcaaagtgtacccccacacgaggtttctggaagtcattttgttgaacataggagaaccatataagtagaaaggtaacttgtcagcatcttttcacatgggagtgttgtaccgaagttttgcaaacatttcatcctggtgtctggggattagagggggatgagcatgtgcgaggcggaggtgactttggcagctgctccgcattctgtctttgccatgcctgccacaaattgccaagacctgttctaaaactctgtgtctgccaattctttcttagatctctatttcaaatgagaccaaagatctgcttctggcagctgtcagtgaggactcatctgttacccagatctaccatgcagttgcagctctaagtggctttggccttcccttggcatcccaagaagcactcagtgcccttactgctcgtctcagcaaggaggagactgtgctggcgtgagttgtcatctcgagcatttctcaggcttcatttgtctcgggtcctatccgaagagggctcattcattggttcagcaaatactttctgggcaagtacttgcagtaaatacttccgtgtgccaggtgctctgcaaggcaccgcagacatgattgcatgaaggcaagtaaggtccgtgtcctcgtggagctcacatggacacagtcttctgcaagcctcgcagacagaaggcaagcgctgagccagagcatgagcacaccaccacctagagatccagttgccttgtgcggttggagggctagagcaagggcagataactgagaaggagccacgtgcatgtcttgttgaggcttggctagggcaggatgacatgttggcagtggaggctctgcaaagtgggggctctcaggatccctggaagttgtgaaagacagcatctggtgggtgaggtggttgctcagagggtggagtattctaggaatcagactctactactctgcaaaaggcttaggtgaaggagaagcacctttcctatttgttataaatggaaatattgtaacttcagggtgttttttgctaagctcttaagtgataatatatgtagttttaaatttttatttatttagagacaggatctcactctgtcacccaggctgaagtgcaatggtatgatcaaactcactgcagccttgaactctgggctcaagtgattttcctacctcagcctcccgagtagctggactacaggtgcaaactaccacgcctagctaatttttttttttttttgagacgtggtcttactctgttacccaggctagagtgcagtgacgcgatctcagttcactgcaacctccgcctcccgggttcaagcagttctcctgcctcagcgtcttcagtggctgggattacaggcgcgccaccacgcctggccaatttttgtatttttagtagagacagggtttcaccatgttggccaggtcttgaactcctgacctcaagcaatctacctgccttggcctcccaaagtgctgggattacaggcgtgagccacagcgcccggctgcccagctaatttttttagtttttagtggagatggggcctgtctgtgttgtccaggccggttgtaatttttttttttttaacacttaaactgctcctttaaaacaatattttttttgtcattttatttgtgttcaccgtttcactgcaaaccctgaaggagggtgtggagcaccgttctggaatcccgttcgttgtttagcaagaggttggtgataccaaatccccctttcaaaacagtgagattgtttcccaggtttttttgtttgttttttgtttttttgctgacaaccagattttctgtaaacttaaagctttgttaaggacagggttcacaggcaattgacattccctctctgtccctcctcacaccctccctatattcacatggtcaatcatcagtgactctagggctgacattttgtacacactttgtccagtgcttggcccttttgggcctttgatttcaggtgacatattttgatatctgcttttaatccctcatggggaatgcttctccagtcaccatcatctcatgccatgatgccactgttagtgcctgtgccttactttgatgctaccttctacaaaaaaaattcccatttccttccaagcagaagggaaaatccccttcctcaaaaccccagaaccccaggaagaagtacaagggaagtacgtccactttggagtcagacagacttaggtttgaacaccagctatttcattccttgtgtctgactttggccaaatttctaacttctctgagccttgcctttaaaatgaaacccataattcttacatcaaagcaactgacaggattaaatgagataataggtgtgaagaccctagcgcagtgcctggttcttggtgggcgtgtaggaaacggagttccttttctggaccatttgtttgttaggtccctaacaaacaggtcccccttcttagagagtttgttacttccttcgttgttgttatttgtatgttaggtcataagcttttttttttttttttttgagacagggtctcactgtgtcatctaggctgcagtgcaatgcgatcatatttaaagctcactacaacctcaaactcttgggcgtgagcgattctcccaccttagccttctgagtagctgggactataatcacatgccaccacacccagccataagctttacttgcagtgcttagagagcctggcacatggtctgtacccaacggagttaataaaggatgaaactatacttttgtgtttctgttgtcttgtagaaagctcataggtaggaagaacatacgctttggagcagaaagaactgtgttcaaatccattcttctactcaacctctgtgaccatgagtgggttgtttagcccgcctaaacctcagtgttctcatatgcaaacctggagaatgtctcgtagggtcattgtgaaatccaactggtaggttgccttatattactactaatttgcgctattaaaggcaagctgatataaattagaactcttctgaatgggccttctatatttaaatgggctttttctaggaagtgtatatttgtaaacttgtcttgaatggaaaaaaagaaaatacttgtagatttgaatgaaccacctgagaagatctcattgtagtctgtcataaatcaatttctctgaatcatctgctatatattagcaagataagatctgctttcttagtgttcgaatacagtactatgctccagagaaaaagaaattgctggctggggaataagtaattaaagccagtgacaaaactttctaaaactcagtggattaatttcattctaaaacttctgaggttgttaccagcacggcactctctcattccaaagagaaaaaaatgatatcttaattgagaagttctttctaggctatcttaactgccttttctgagcacagcgtttatcacgggcagatgtgtgatttttgtcttgtttggaaattcaggtttcattttctcaagtgtatgataacagcaagcatcccataggtgtcgttgaatactctggggcttgtctctctgtaaattgcgactctgctgttttccaacttgtcatcttaatggaatgagtttcccatggagagaatctaaattgttatgttcttgacataagcagacagattcttgctctacattccctgacatattgacttgataagtggtggttttacacaagggcccagtcatctcttaggaattaggaaaccattcggggtggaagcagcaatctgtttaaccaccagggggcctctcctctcccagtttcacccagaaaagcaccatttatattttccaaattatctgtattaagataatagaatctaataagtcttacatgtatacatctatcatgttccatcttaaaaagcttatcttccagaattatagataaaaatatatgaataagccataaaaaagaatgaagtgcagatacgtgctacaacatggatgagccttgaaaacattctgttgagtgaaagaagccagacataaaaggacacagattgtatgattccatttctatgaaatagcagaataggcaaatccgtagagatagaacatagattgctggttgctgagggctaaggggagacacaatggggagaaactgctcggtgggttttatctattttttttggagacagggtctcactctgtcacttaggctgagtgcggtggtgcaatcacagctcactgaagcctcaacctccctagctcaagtgatcctcctacctcagcctcctgagtacctgggactataggcatgtgccaccatgcccagctaatatttaaattttttgtaaagatgaggtctcactgtattgcccaggctggtttcgaacccccaggcttaagtgatcctcctgcctcggcctcccaaagtattgggattacaggtgtgagccaccgtgctcaaccaatgggttttattttagactgatggaaatatttgggaactagacaggtggtagttgcacaacattgtgaatgtagtaagcacccctgaattgtttgctttttaaaatggttaattttatgtgaattttgcttcaatctttttttttttttttttttttttctgagacagggtctcactctattgctcaggctggagtgcagtggctcactgcaacctctgcctcctgggcctcagcctcccaagtagttgggactacaagcacacgctaccatacctggctcatttttagtatttttagtagaggtggggtttcaccatcttacccaggctggtcttgaactcctgggctcaaggaatttgcctgcttcagactcccaaaatgctgggattacgggcgtgagccactgcgcccagcccaatgcccacggttcttcttgccagttctgttgcctgggttgccttctcagctgtgatgatcttttccaggttttgtcacatctgtcctaactggattataagtaaactccttaaaggctgagaccaacttgtacttctaaagaacaagagtaggatatttgtgaaagtgtccaagtacgggaaggggtgagtggatgaaacaagacttgccattcattggggttctactctttaccttccagaacagtccaggctctgcagacagcatcccacctgtcccagcaggctgacctgaggagcatcgtggaggagattgaggtgtgaatcttttgccaaatgcatctcccagctcctgtctttgacactctgcagaagaatcttgcagatagccatgcatgatctgttactacaggttacattgcttcttatatccatggcacacttgtgttctttgtattaaggtattgtgtcctgaggaatatttgtgcctattacataataggtcctcaggacgtggtgactgtggtttttattattgctctatccttgcctttgcccagaatatcatgctcctctgggacctctgtcatggactgcctggcaggagtgacaagcagtcctgatggtgttctcactggatgcttcacaggcacgttggttgcctagtcatgttgcctaggagagcagtatgtctctctttgtcttttggagcattaagaaattctgggaaacgctgtgctttgtaggttgtattcaaatggatggccatggactccatctgtgtcatgatgcttcctgggtgcacagcagcctggcccactggctttccacccaaagcagctggcgtgttctgtgccatgactcctgggcttgggcctgcatacaaggggccaaggaaggagccctcccaaaactgcagaagatagtgctctcctcaaatgtctgtttgatatactttactctgcctaagcaccatttttgagaaagtatgaagtgactgagatggtcttcagatttagagtgagagatgtcacgaagctgtctgcagtggggttgacagtggttcgtgcatctcatttctgctgttacttgacatccagcatatttctgttttgttatggcaggaccttgttgctcgcctggatgaactcgggggcgtgtatctccagtttgaagaaggactggaaacaacagcgttatttgtggctgccacctacaagctcatggatcatgtggggactgagccatccattaaggaggtacctatctaacaattttcaggcatgaaacccaaaggggtcatcagctgtatctgctaaggatggcttttatcagagaggaatgttcagacagtaccttgggatgctgtcactcagtgtcctgggttagggattaagaatgagaaatagaaagatgtaatgcctgtcttcaggaaatgggttgctagtgaggtagacgtgtaaacaaaccatgcttgctttaaatggggtatgtacatgtcacgaggtagtatcaaggaagccacgtgtattactcctgtttcatctccctttcttcccagtacccttttctgcttgtcgcctgaatgctttccactctggtggctcattcagatccttctctgggctcacaattgcttctcctcccttcccccttatgctcagcaacggctaaatcttagctaatctttgctgatggacatagttcactgagaggcatgtgtgtctatcacacatccgccaagagttcattctttttctcaagaggaggttgttaacctgaaagaatctttagttggaatgcatgtgggaagcctttttgagtaggaccgtctttgtaccccttgtttgtgagaagttaccagcccttaatctaaagtacttaaaatacaagctgcttttatttaaattttaggaggagagatttgggttttaagtgagaattttcatttctttatgcattatgagttttgtgccaagtttctttaagtaaatagttatctgtcttggataattggaattaatttcatattttctccatgtggtcaaataagttattcatgtgtttgcattctttttgtgtctcttcctttgtcctaagtgtaggaggtctagaaatatactcccttttaatttctgttatgggtgaaattgcaagagtgtggggtcttagggtacagattgtttgctgattgtcctatacacagtaaagtagatgaattaatgatattgtacttatacaacttaaacattttcttcctttatttccaagctgctgctaaccaggtacttggctggagtaatttcgctgtcactgcttttgacaaaacaattctggtgaacagtcacccattttaacgtgtcaacagagtagtgatggaaaattgtaattggtccaattaaagaaaattctttcatgttgactgtgaataacactgtcaggaacaagagagcccttttgttggatggtagattttaaaaaacaaaactgattgaaggggaaaatgtttcctcctaagcaaataacctccagaattttaataatgccttttaggttccacttttttaaaaaattgcttttagttttctcctctaagcagcccattagttcttaatggagagttattttagtttctttttaatgtacattttagctataaagtttggtcttataaataaaaactttgcctcaatgtactacttacaagtaggttgggaggaaaggtagcttagctgggaggataatgagaatcaggaaagaacagattttcttgtagaaggactttggagacaaacagtcctacatttgaatgttggtcttgctaatgttgtggtaacttgcagaagttatttagcctcctttagcctcagtttcattttttgggaaacattgataatagcaatcttttatagtttttgtcaaaatttgagttaatgcatgtaaagcacctatcatgatgcctggcatatatagacattaacaaataattactattatatatatttcataatatagtttcatatctcagtagttatctggaagtaccctgcatttgtgtagtaagcattattatgatttttttttcagacagagtctttctctgtcgcccaggttggagtgcagtggcgcgatcttggctcactgcaacctccacctcctgggttcaagcaattctcgtgcctcagcctcttgagtagatgggattacaggcgcatgccaccatgcctgactaatttttgtatttttagtagagttggggtttttctctatgttagtcaggctggtctcgaactcctgacctcaagggatctacctgccttggtctccaaaagtgctgggattacaggcgtgagccactgcacctggcctgtataataagcacttattaaataactgacaaatcatgaatttcagtttataaaggaagatggaaaaaaaaacaaccacatccaagttctaagtttaaatgcagaatatttgcgttttctccatctacgaatttggatcattgaccaaaagacctcccatgtgaacacccgaaacagataagggtgactttcctctacagcagtggccctcccaccttcccagcagaggaagagaaacagctgcatttcgcatttctttcaggatcaggtcatccagctgatgaacgcgatcttcagcaagaagaactttgagtccctctccgaagccttcagcgtggcctctgcagctgctgtgctctcgcataatcgctaccacgtgccagttgtggttgtgcctgagggctctgcttccgacactcatgaacaggctatcttgcgggtaagacatccatgcccaaagtgtgcccctctgattatcattcctagtggaaggctttcagaaatctggactatggtcacagccaattacagcccctacaaggacatacccattaaatggagggcaaggctcatttccctgagccttgaaatggagacatgaccactcggtgaactagccacagaacccttcaaatctattaaaaaaatttttttcccctcgtggatttttaatttttgtttctttttttgagacagagtcttgctctgtcacccaggctggaaagcagtggcatgattttggttcactgctgcatccacctcctgggttcaagtgattcttgtgcctcagtctcccaagtagctgggatcacaggcgcacaccaccatgcctagctaatttttgcatttttagtagagatggggttttgccatgttggccaggctggtgttgaactcctagcctcccaaagtgctgagattacaggtatgagccactgtgcctggcctctccctagaggattttaaatagtacaggcttggctgggtactgtggctcacgcctgtaatcccagcactttgggagactgaagcaggcggatcatgaggtgaagagattgagaccatcctggccaacatggtgaaaccccatctctactaagaatacaaaaattagcagggcctggtggtgcgcacctgtagtcccagctactcaggaggctgaggcaggagaatcgcttgaacctgggaggcagaggttgcagtgagccgagactgcaccactgcactccaacctggtgacagagtgagaccctgtctaaaaaaaaaaaaaaaaaaatacaggctttcagtaagtgcaggaatattgcatttctaggtctataactccagatgtatagagaagtcttgcatctaaaatgcacttcccaataccaaactttctttttcatatttttttggttttgttttggttttttttgagacgcggtctcgctatgtcgcgcaggctggagtgccgtggtgcgatcatggcccactgcagcgtaggcttcctccagtacccaaattttctaaatatgttattttacgacagctgttttaattctcaattaattctggtgtttatggttgatcagttctctttttccctggtccttgatgggatatctttttgcctctttatagcacagtcctccctttcactcagcagtaagcatagacttctcctttgtgttaactcgttgaacagagcacatgcacagatcttgaatatgcttagaacttttatctcaaatgaggcgttttgttgctgttgtttggaaccagtgataagctaagatcttcatgagaaattagcattttattaatgtctaagtgttgggtttccacttaggacagttctgtctgtcccattagttctactttggtggcccctgcagatatcctcctgagcgagtaccctgttcttcaaaattgcccattttctccctacatacaactcatataccctcaacaaagacttgggtagaaagtaacctgagtaacatggtttcctgtgagtcaagaggggctaagagaacaaagtggaaaaagaattgactctgaagttaaatagatggtttgagtcctggctcaactgcttaactggccatgtgacctttagcagtcccttaacctcttgtggcttgtttcttcacctgtgcaataaggattattctatctgtgtcgtacaattgataggagaatgtatgtaaagggcctagcctggtatatgcatatagttgactttcaacaaatgatagttattaatattatccatatttctttaattttcccattgctgataccattctaaagtatttttctggctgatttatttattaattttttagtagagacggggtctcactgtattgcccaggctggtcccaaactcctggccttaagtgatcctcccatctcggcctcccaaagtactgcaattacaggcatgagccactgcacccagtctagctgagacatttttttttttctttttcagagacagggtttccctctgttttccaggctggagtatagtggcgcaatcatagctcatgctaactcttgggctcaagcagtcctcctgcctcaacttcctgagtatctgggactacaagcacatgccaccatgcccagctaattttttaatttaaaaaactttttttttttttggtagaaacgaggtcttgccatgttgcccacgctgttcttgaactctttggcatcaagtgatcctcctgactcagcctcccaaagcactgcaattataggcatgagccatcatgcccagtctgataaattcttttaaagattctgtagtagagtggatagaatagggaatcagaaagaaggcaatatattggccaggtgtggtgactcatgcctgtaataattcactttaggattaggcagcaggcccaaggtcagccaagatttcccgaagcaggggatttgctctcctgcagagcttgcaacctatagataaagcaccccagaaacaaaattctctgctcctgtagcctttgttgtaacaaataattttttatttatttccagttgcaagtcaccaatgttctgtctcagcctctgactcaggccactgttaaactagaacatgctaaatctgttgcttccagagccactgtcctccagaagacatccttcacccctgtagggtaagtcctgatcatattttggtggggcgctgacctctttgttttggaaagttagcctgcagccagtgtaacagattaatacattccagttaggtaaatttgatctactggtatcgaaagcctacagtcgaatgtaagaaaatgatttttaaaatgaagattatttggttttactgtttcattctctgtttctagttggctctgtcttgtcattgtgacataagtagctattttgaaatttaatatttattgatttttttctgataaataataatgtttattataggaaaaatacagcaaagcacaaaaaaagaaaatataacttacccataatgctaccattcagagataacttttgctaactttttttttttttttttttgaggcggagttttgctcttgttgcccaggctggagtgcaatggtgcaatctcagctcaccgcaacgtctgcctcctggattctagcgattctcctgcctcaatctcccaagtagctgggattacaggtgcccgccaccacgtccggctaattttttgtatttttagtagagacagggtttccccatgttggccaggctggtttcgaactcctgacctcaggtggtccacctgcctcggcctccctaagtgctgaggttacaggcatgagccactgtgcctggccttgctaacattttataatttttttttgacagtcttttttctatgtatgtaaataaattttaaaaattcagttaagggccaggcatggggctcatacctgtaaccccagcactttaggagactgaggcagatggattgcttgagcctaggagtttgagaccagcctgggcaacatagcaggaccccatctgtaatttttatttatttatctatttattttttgagatggagtcttcctctgtcacccaggctggagtgcagtggtgtgatctcggctcactgcaacctccacctcccggcttcaagcaattctcctgccttagcttcccgagtagctgggattacaggtgtgtgacactacgcctggctaatttttgtatttttggtagaggcagggtttcaccatgttgaccaggctggtcttgaactcctgacctcaagtgatccacccacctcggcctcccaaagtgctgggattacaggcgtgagccattgtgcccggcctttttttaaattagagatgggggccaggtgtggcagctcacgcctgtaatcccagcactttgggggggccaaggtgggcggatcacttgaggtcaggagctcgagaacagcctggccaacatggcgaaaccccatctctactaaaaatacaaaaaaattagccagacgtggtggtgcacgcctgtattcccagctactccggaggctgaggcaagagaatcacttgaacccaggcagcggaggttggcagtgagctgagaacgcgccattgcactccagcctgggcgacagagcgaggctccatctctattaaaaaaaaaaaaaaaaatcagggtatgctttatatgtaacaatgtgccacaaacttttttttataggattaaatattcttttacaatttttttttttcttttttgagatggagttttactcttgttgcccaggctggagtgcagtgtagtggcgtgatgtctgctcattgcaatctccacctcccagcttcaaatgattcttctgccccagcctcctaagtagctgggattacaggcacctgccaccatgcccggctaattttcgtattttcggtagagatggggttttaccatgttggccaggctggtcttgaactgcctcagcctccgagtggctgggattataggcgtgtgacctcaggtgatcctcccacctcagcctccaaagtgctgggattacagttgtaagtcaccatgcctggcctttacaatgatttttaatggctgcatattattgctatgtaattttttaaaaactaaggcccagtttactgggtgtgtggcttgcctatagttccagctacttgggaggctgaggtgggaggatcgcttgaggctgggaggtctaggctgtagtgagccatgatcataccatatcactccagcctgggtgacagagggagactctgtctcaaaaacaaaaacaaaaaactaagggtcaagctgggcacagtagcaggtacctgtagtccagctacttggaggttgaggcaggaagatcatttgaaccgaggagcttaagaccagtctgggcaacatagtaagacctgtttctaaaagaaaaaaattaagggtcaatttttatatgaattagtgtttttcccagctaattgtatagaatttttttttttttttgagacagtttcgctctgttgcctgggctggaatgcagtggcgtgatcttggttcactgcaacttctgcttcccaggtacaaggaattctgcctcagcttcctaagtagctgggattacaggcacccgccaccatgcccagctaattttttttgtatttttagtaggaatggggtttcaccatgttggccaggctggtttcgaactcctgacctaaagtgacccgcctgccttggcctccgaaagggccaggattacaggtgtgagccactggccttatatggaactttttgaagtgttaaattaggtaataagttattgagatcaggagttttcaattttagagagaaaatgcgtttcttaatcataaggatacataggcaatatgtgaaattaaaaagcaaaatcatttttaggcgtgtcaatggagtggtaaaagacattgagattttactatatagttagagtaaggaattctctacctttttttccctttaaaataaaaataaatatttttaataaaagtaagatatgtcctttttgagaaattcacaaaacacggaaaggtagaaatcataccaaaaaattagccacaattatactatcgtacaccaacctctttgtacattttggagtattttcctctacatttttgttgtcattgtgaaacatatgtgggatcacattgtaaacttctcaattttacattacactgtggaaagctaccaggagtttgaattttaggagtggtgggagtaacaaaggaaaagaaaacgttggaaacctaggggtgttcatcttagatacttttctccacatgccaatctgtgattaagcacgagggtcaggcatggtgactcatgccccagcctgcactttgggaggctgaggcaggtggatcacttgatctcaggaccctgtctctacaaaaaactgcaaaattatctggacgtgatggtgcatgcctgctgtcccaactaccagggaggctgaggtgggaggatcagttgagcctacgagttttgagactgtggtgagctgtgatcgtgccactatactccagcctgggtgacagtgagaacctgtctcaaaataaaaaaaaaataagaagcacgagattgcccaagtggggtgggaagtcaaaaaggtaaggagttggctagccttggacagtctccaggagacattttgtagctcctgtttgttatatccatgactttcctacctgagttcttgctaagcccattgtcattcttaacagggatgtttttgaactaaatttcatgaacgtcaaattttccagtggttattatgacttccttgtcgaagttgaaggtgacaaccggtatattgcaaataccgtagaggtaggtgtttttctttccttcccattgccatgttagtatatccaaggatatggccaaattgacacagtattaattgtctggtgcattgacttttctctacaaccaagctaatgtgtttatgtggagggagggctgcattcagtctttgctgtttgacagacttagtagctaaggcagtaaatcaagaacttggtcatagtgaattttcttttatttgtaagtttttcattttccattataatttagcattactgtcttacatgaaatttagttagtagaaaaaataaaaatcacccataattccactgagccttaaactcttaaagtgttttgtgtgataggctttggtgggtttagaaaagtgcttgatgccaaataggtgacaaaaagcaccaagtgacacatacgtaacactataatgaagctatttgggtaaaggataaaagaaaatcagtaatctttcataatgaactttgttgatgtttagctaactctagctgggttgaagatcgaagtagctttaaggatagaaagccttatttacctgatgctttgtgggaaagaggtagttcaccttagtatttttcccagctaattgaaatttaccccatctggcatggtggctttcattgtaatctttttagatagaagtttatttaagatgagtgacacattttcctactttcttacttccaatttaagatggtttctttgtctttcatgaccttgacacttgaagaggatgggctctcaatctgtagaatgtctctccgtttgtgtttgtctgatgtttcttcatgatcaggttcaggtcatgcattttccgcagttctatcccaaaagtaatgctctgccctactcagaacaagaagtatatgatgtcgatatgtcttattacaggtcatgttaaccttgatcacttgagtaaggtgattgtgtgctaggtttctctgctgtaaagttgctgtttttctgcttgtatttaagtgtcttgtggggtggtactttgagactctgtaagtatcctaatgatgttgtctgtaatagttattactgtggtgtttgccaaagggtgattttctctttcattccttctacattttaaaaattggaattctgctgtaagaaaataactgtgttttataccattttatttataactatcataattctttatcataacatgtttataatgtaatatattttctataattcatatgtttacaataattgcatcatggacatttattttactatatacattgtggtccatgactcatttatcttgttgctcattttatcctaggtttggcctttggagagctcctcaaattggctcctgtgacacttgctttcttttaatgacagaattaatagctagaaagtttgaccttttcaaaaatgcggcattacttcccataggtagattcaacacttgcatttaaagtttggcagaaaggaagatgttttctggaactcgaatctcttcacctcatgtgttgacctttttagcatgagacatctgatcttagttcgttcactatggatagaagctattgtagcgtatgccttgatcctttcaaatccacattcttataatgttagtttcctatgttaagaggacttatttgcaactgaacatattaaaaggaaagttctttttttcttttctttttttttcttgaaacctcttcttccctgtacttcgagtccatcttaaatgccaggcttatacctcacagttcttaaccccttcctttcttttcacttctaccttctagtcagttaccaagtcctattgattccacctctgattgtcttttccatgagtcttttgctgttacagtcaccaaattgctctattctccatattcgtaccaatatttggtatttttaggttttagtaatctgatgcatatgaaaaggtatcttgttttaatgtctttccttggttactggtaaagttaaacatctttttatatatttattagccaattacatttcctttccagtgaattgttttatatctttgcctggttttcttttggtttgttagtcttattactgatttttaggagtgatatatgtttagttgtgagcatcagatatcttcccctagaattgctttatggcatctcttgaagcacaaaatttaattttaatgaagcctaatttaaatgtcttttcctagggccaggtgaggtggctcacacctgtaatcccagcactttgggaggccaaggcaggcggatcacctgaggtcaggagttcaatactagcctggccaacatgatgaaaccccatctctactaaaaacacaaaaagtagccaggcgtggtggcacgtgcctgtaatcccagctactcgggaggctgaagcaggagaatcgcttgaacctgggaggtggaggttgcagtgagctgagatcgtgccaccgcactccagcctgggcaatggagccagactctgtctcaaaaaaataaataaataaataaaatacaagtttttttgctagactgtgttttttatatcttctttaaaacaatcctgtgctaccccaaagtcaaaaagatattctccaatgttttctttttttatttttatttttgtttttgagacagagtctcgctctgtcactcaggctggagtatagtggtgccatcttggctcactgcagcctctgcctccggggttcaagcgattctcctgcctcagcctcccgagtagctgggactacaggtgcatgccaccacacctggctaatttttgcatttttagtagatacagggttttgctatattagccaggctggtctccaacttttggcctcaaatgatccgcctgctttggcccaccgacgtgttgggattacagtcgtgagccactgcacctggccctccagtgtcttttgaacatttttaaagttgttttcccccttatatttaaggcttcggtctatctgaagttcatttttgttgctgtagtattttacacccttttctataattgtacttattgcattatattaccattgtttgtttatatgcattgctttttctttttctttttctttctttttttttgagacaaggtctcattctaccacccaggctggagtgcagtggcgtgatcatggctcactacagccttgaccttctgggctcaggtgatcctcccacctcaacctctcaggtagctgggactacaggcatgcaccaccatgcccagctaatttttgtatttttttctagagactgggttttgccatgttgcccaggctgctctcgaactcctgggctcaagcgatctgcccacctttgcctcccaaagtagtgggattataggcgtgaaccaccacctgcattgctttttcactgggctgagaactcctatgggtgaaaactaaatattattattattattattattattattcttttttttttgaaacagagtctcgctctgtcaccaggctggaatgcagtggcgcaatcccggctcactggaacctccgcctcctgggttcaagtgattttcctgcctcagcctcccgagtagctggggctacaggcacgcgccaccatgcccagctaatttttgtatatttagtagagacggggtttcactatgttggccaggatggtcttgatctcttgaccttgtgatccgcctgcctcggcctcccaaaatgctgggattacaggcgtgagccaccatgcccggcctaaatcttattttttcagtgcttggtttccatttaacattacttagaggaagaaaaggatagagtggtctaaagatgtttttccacattgcaggcccttcagaactctggcaattcatcttccagacttagcttttttttttcttttttctttttttgagatggaatcttgctgtcacccaggctggagtgcagtggcacgatcttggcttactgcaacctccgcctccacctcccgggttcaagtgattctcctgcctcagccttctgagtagctgagattacaggtacacgccaccatgcctggctaatttttttgtatttttagtagagacggggttttgccttgttggccaggctggtctcaaactcctgaccctcaggtgatctgcctcgcctcggcctcccaaagtgctgggattacagatgtgaaccactaggcccggccaagagttagcttttatttattgatttaataacagctttattgaggtataattctcataccataaagtttaccaattaaaagtatgtaattcaggctgggcatgagccaccacgcttgtaatcccagaactttgggaggctgaggtgggaggatcgcttgagcccaggagttagagacaagcttgggcaacacagggagatcccatctctaccaaaaatttaaaaataaattagccatgtatggtggcatgtacctgtcccagctacttaagaggctgaggcaagcggatcccttgagcccaggagtttgaggctgcagtgaactatgatcacactactgcactctagcctgggcaacagagtgagaccttgtctcaaaaaaacaaaaagcctgggcgcagtggctcacacctataatcccagcactttgggaggccgaggtaggtggatcgcctgagatcaggagttcgagaccagcctggtcagcatggggaaaccccgtctctgctaaaaaaaaaaacaaaaaaaacaaaactatgcaatccagtgtttttagtattttcacagacttgtgcaacccttgccacaatgccattccagaatatatttatcaccctggagagcaatgctatatcttttagtgggcactcctcattctctcttcctactttctgctttctgtctctgtggttgcctatttgggacattttgtgtaaatgaaatcatacaataggttaccttttgtgtctggcttttttgttttttcacttaacataatacttctaaggttcatccatgttgtagcatgtattagtactttatttctttttatggcaaaataatattccattgtatggatatatcacattttgtttaccgacttatcagttaatgacatttgaggtatttctcttttttggctcttatgagtaatgctgctgtgaacatttgtatataactttttgtttgaacacttgtttttggttctttcaggtatatgcttaggaatagaattcctgcgtcatatggtaactcggtgtttcacttttcaagaaactaacaagttttcaaagcagctgcaccattttacatttctaccagcaatgtgtgagggttccaattttactacatcctcaccaacacttgttattatctgactttttgattttcgccatcgtagtgggtataaagtggtgtctcattatggttttgatttccatttctctgataggtaataatgttgagtatctctttatgtgcttattggtctcttgcatatcttctttagaagaatgtctattcaaatccattgtccattgaaaaaaatgtttttggtctttttttcttccttctacaatctatacacctcttatttccttttatttatctttttatattattgagttgtaagggtttctctggttagaggttccttattaaatacatgatttgcaaatattttctcacagtctgaaggttgtattttcactttcatgatgttgtcttttgaggcacaaaaaatcttaattttgatgaagtccagttttaaaatgttttgttgttgttgtttgtgctttaggtgtcatgtctaagatgccattatgtaatccaaggttaagaagatttactactatgttttcttaaaagaattttatacttttggctcctacccttaggtttctgattcattgtgagttaatttttgtgtatggtgtgatgtagggggtccagtcttcttttgcagttgtcctagacccatttgttgaaaaggctgttctttccctaacgaattgccttggcacatacatccttgtaggaatcacttgacaataaatgtaagggttgatttctggactcataattctatttcattaatctgtattgtccttatgccagtgccacgctgtcttgattactgtaacagcttggcattttgtaacatcaaatctggtgtttgtccaagtgtttctgtgattgttggaaaaattatctaagtacaaaatagcagaaatggctaatagctcttgttcatgcaatgataataagcccccattgaggccatttactctccttttcctccctagtgatggagtaagcattacaaaatcttctctcttcctccttattacattagaggtgtgtgtgtttgtgtgtgtgtgtgtgtgtgtgagtgtgagagagagagagagtcggctttgacctttgccgtatatgcaacttttctttgtaatttcagtaataatcacacttagagcctcagagcaggtcattgggtcctgtttgtcctcccaagaaatgctcgacattggtcagagtgcattaacggtggtttggtgtggaagtcctgtaatagccctcattgacattggactggctgtcaggggaagcatcggttttggacgctctcattagcattaattgcccctaatgcaccatcatttttgacagtaataagctaaacaggggtgttattactcccagcagaaagactgcatttcctggcgttaaaacattttttgagatgtatatggcatgtggtgcaggcaaagaaaggaatagcatgatccagtgtaaagcaggcttagctgcatttaaagtggagaaataagtccctttcctattataaaaacgaatcctgcattgttagttggaaggaagaagcagctaatcaacagggatcctacactgaactctttaaaagagggctttggaaaaagttacgatttttatttctaaatttgctttaaaagagtagcataaaaatgctttgcttttgagtgtttccagagacccatttatagtgagattttaggagcagaaggatttgttttaaactgttccctatttaggaacagccctacgggtgtttatgtgcaacaatgaaagctgtaacttaggaaaccttttaaaattggggctgagagcaaaccaagaatgatgcaagttcactgcagtttgccctttgctcactccatgtatctgcattgtctggggatgctcaggatgtctttagaacacacacgaagctggatcctgattagctggccttggtggccagttagtgctgagagtttacagccaggattctaagtgaaaacctaaaagctgatagcttccttatcactatcattaggagacactgaagactttacacaattcttttttttttttttttttgaggcggagccttgccctattgcccaggctggagtgcagtggcatgatcttggctcactgcaacctctgcctcctgggttcaagccattttcctgtctcagcctcctgagtagctgggactacaggcgtgcatcaccatgtctggctaatttttttgtatttttagtagagacagggttttgccatgttggtcatgctggtctcaaactcctgacctcaaatggtcctcctgcctcggcctcccaaagtgttgggattacaggcgtgagccaccacgcccggcctagtctgttctttttaattgctccatagtaattaataatatgcatgtatctttctttatttagctagtcttctgtttatggacatttcagtaggatgatgatttcaagatcacatttacagattaaatgaatgagttcttaagagaatgagttagagaaatagggaattacctagttaatcttgatgaagattgcagagtagttaactctgaagacagattatttttatagcatggagtattattgctaatcctcctacctctcccaaaattggagggctgctaagcccatcaagcctcctcctcagtcttcttgctatggaatgtttcctactccccatttggggccacccatgggcagacttgggtcacagttccttctgtgctttcataacactttgtacatccattaaagcagcaacctggtttattataattatggtttgtgtacgggacaggaaggatttcttgccatctctgtatattccctgaatggggaaagtgctctcagcaggtgtcaaatcaaagctctgtggctacttctttgcctgagccttccattccagtttgttttccagtggaaatgatgtcagtacttgtcgggttgtgttttttgcaagaaagcttgctctggttctgagccttgcgtgagttgtaacgctgttaactcagcagagagcccaaagagccaaagtgaggctcctagctcccttcttgggggtgtctattcaacctgatgggccatcgtccctcctcctccactgccataatttcacccagttgcctagactcaatgacaggcaatgatcctaaatatagttctgctatgaattcataggtggctgtgaattcaaaagtagatggtaatatccttacagcttctggtaataaacctttacagtttttttttttaaagcaaaacaacacccctattcaacatgataattgaggctgttgtcataaaatagttattacagaggcaggaaagaaggccgttagaaggaattacttgataggtatctttatttttaatttttcttctttgcccttgatttgaggttgtcacacctcgatatggtatttcagaaaactgccagagctatccttcaattatttgcccagcccgttatctctattccttgatcctgacttagactataaaccagtggatttggcaaggatttccttaagtgttacattcaaacctatcaaatatttggaaggcttacagatctgtttgcacataaaagcgccttgggtttgcataatttgcacattcaaacttgggttttaattcagaaatttaacatgttttctgtctcttttggatatttacattgattttaatctaattttaaaatttctcatttattggcattagcccctctttgtgaagatgtttaagggacatacagaattcaaacactttaagagtcaacatggattggtttgtgcttataacaaactcccaatctcagtggcttaaaacaatgagggtttattttttccccacgctagattctttaggtggtcaactggaggctctgcttcatgatatctttgctccaggaccctggctgaaggagcaagcatctggacattgtgtccatgtcagaggaaaagagagaatcacacattgattcttaaagctttcacttctgcccacatttcattggccagagcaaatcatgtggccacacttgactccatgggggcagggaagtagaattctaccacatgctcagaaggagaatgagaagtacttgggcaacagtacagataactaccatgactgtctaacaaggagctgaagtgcatggattctgagtcagagtgcctgagcttgacactggcctgatcacttcctcacagtctgattttgagcaaagcagcttcatctctctcatcttttatttccttatctgaaaagcagtaccttacagaattgtgaggattaaatgagatagtctttacaaagccagtgcctttcacatggtaagcactcaataaatcctagctatcattagaacccaattcttgctgatttgaatgaaaggtactgcttaaggatttttccccttatttattttaaaggacacatgaaaagatttactttttttcttttcctttttcttcttctttttttttttttgatgtttaccatccatccaaagccagaaaaagacattttaggcctcggaatgggagaggttggaaatattactgggctgggtcagtgttattatcatccttgaagactcttgttctaggattttttcatgcctttactcaccttaaagaatagaaaactttatatctgcatgtgaattcctgaacacccaccaattgacctggcaactgtcttctctattttcctctagctcagagtcaagatctccactgaagttggcatcacaaatgttgatctttccaccgtggataaggatcagagcattgcacccaaaactacccggtaggtgagatgccacctgatcactcagggagctgaggctcaagagctgagaggagtatgcctaggcactgagccctgcaggcatcagttctgtgtcagcagccatccagcttacatcctaaattaaagagtctgtagttccactggtcctgcaccggggattctgcgaattatctaagtggatttggagattgtatataccagtgtttagtccatgcacaaactatttattaaccagtcctcaacgaggtaaagcgcttacctcaggatgttagtctgagtcagtcagctatgtcactaagcatattatttagttcagatgataatttttaaaataataagaccttctcaatgaaggaagcaaggtattaatttacattctggtgcgatctccttatcatcacagtcctgaatttgcttttagtgacctaatggcaagtctctctggcctatgatgggtctgaaattagttggaagcctcacacgtgcttaaaattgagatggcagatacccagcactagggctgccatttccccctcccaagtccatggaggcagtactaagaagtcatagaacatttgctcccactgaactcagacacagcctcagaatctttttttgaaacataatcttctaagtagacactaacaattgaacagagttgggccagaatgctgtaagaagcctgctcatcagccctcccccagatccttattggctcagcggggatctagatttctggggtatagtccagaccccaactttactcaactagggtagctatagaggccagaagacagtagggtgaaccatcaaggctctttgaagatgggatgttagccagaggctggaagccaagcagctactccttttaaatcacatagagttggcctttgtgtctctgggttggctatttttgtagtgatattggagataagagcactgtttaagaatccactgaagaaatgtctgtgcgagcgctttgctgtttaattctctgcctagatgaagagttggtcttacttacgagtaaatgtaaaatgtgagtataaaataaagccaggtctgagctctgtaaccatttggctggtttatcccctggccatcttaccctaaaatcccaggagatagctgtgaaaagaagttttcctcatcaagtctgccttttgggaaaatgactttttaaaacccagtttcagggcagaaaactaaattgaaacagtgtccaggaaaaaaatatagcattaaaaaaagacaaagctgaaagtacccttctttcttttgtgtctcctacctgccttgtctcgattttgctcacgtgtgctgctggcatcaatcctgtaattatttctccttgcggttctgccagcccggctctcctgtgtgcctgcagaggccacacgtgagctcctctggtgcctgactttgttggagttgagagccttaggtccttgaagtgaaagcccagaggtacaagcatctgtacacagcatttccccagatcctgctggaagtttattctgcacttttctcagtccaggctttatcagtccaatttgcccccaggttgcagacagttctccacatctgtctgtccacaacagaagtgttactatgggagagggtggttgaggcaatgaagtgaagtatatattttctgcctgttctcagagatatactgatcctctctgaagactaactctatatgcctctttcagggtgacatacccagccaaagccaagggcacattcatcgcagacagccaccagaacttcgccttgttcttccagctggtagatgtgaacactggtgctgaactcactcctcaccaggtcaggaagacacctagacagttctcttaacctgaaatgtgaatggatactagagtttacaatgtggtctataacatggactagagagaattccacgttcctgctttcaggttttgaccgaaccctgacagtccatcaggttctcccacatgacactctcacccttctactggttgtagtcctttacctgggatacacccttctttctaaaaagttagctggtattgaggagaggtacttaaggcagatttgcacttaattaaggtcattccttcctccctccctccctcagatggactcttgctctgtcacccaggatggagtgcagtggtgtgatctcagctcactgcaacctctgcctcctaggttcaagcgattctcctacctcagcctcccaagtagctgggatacaggcatgcattaccatgcccagctaatttttgtatttttagcagagacagggtttcaccatgttggccaggctgttctcatctcctgacctcaggtgatccgcctgcctcagcctcccaaagtggtgggattataagcatggcactagactcgaggctttttctttctgatttaaaaaagggaatgtgctggccaggcatggtggctcacgcctgtaatcccaacactttggaggcagaggtaggaggatcacttgagcccaggagttggagaccagcttgggcaatatggtgagacctcatttgtgtgtatgtatgtatgtataaataaataagggaatatactgaaataatttcaaaagaagacccaaagcatttttttattctagccaaagcagattttgtatttgtgggactctgaagaatagcccttttaacttgtgcttactttgtattatgaaagcaataggctttatttttttcatagagtaatgaaaattattatttaaaagattttcaaaccatatactctttcccctgagaacctaatatggccccatgtccactcagatacccccactcccacactgcctgtcatcccccttgatggagaataacctgcctttagtgttacgtgaaggaagattcagataaatactttgaatgctgaaagacaggaatgcgggacctagtttggtatggggtaccctgtaccgatgctttagcaaggaccagcagacttgttgccttgaggcagcttcagggcagacctcagaggcaactggatttacttgagaaccttcttgctttctgtttcttgcagctgcagctgttggacttgtgccccaggagcacgttcctctatggccacagtcctgggagtcctctgctcctctctcctccctactcccaaactccagacagcttggttagggcccttagccaagcctaactgacctttgagtacttcagcctcttagcatttcccagcttcttcccagaatgacatttgccaaccaaatagcacaagggaaggaagagtacaaagagaagaaagtaaaagactaaactagtaggattaggattagagcaaggagagttagtgaggaagtgtaactttcactgaatacttgtctcatccagaattctgctgtagaatcatggcctagagaccttccaggtggaggtggcattttggtgatgaacttggcagctgcctgcacttgattgtgataggaaggagatctggcatccggtctccccattccattcctggccaagactaattgctgtagttgggatgcttcatatctctgggcctctttccctaaatgctttggtggtggttctttgttgttcaggtatagattaacacatgagatgtagattttctgtagatacagtgctggctctgtcaccctgccaactcatttaatgcttgtgccttgtgatctgtaaattggatctgtaaacctacctgccttgttgaattctttattttgaaacacctgaaagaaaagctctgggtagttatcaagttttggtccagttctaatgtgcagacaccttggtttcttgtgccattagtggggataaagtgattagactcagtaccatcgtattgctattaactactatttgttgactagctagcatataccgttccctgcactaatgcttagcatatggtattgcaaatcttcacacagatatgccacatctggaagttaatttttctgccttaaagttgaagaaatcaaagcacaaggaagttaagtaacttgctcagctaataagtagtggaagcaaatctgtcttccaagccgaggctctctccatgacactgggctgctctgcttgattagaactctgccttaccatcaatacccaagcctcctctactaaatctttagctggaggcacaaggaaattgaaaatgggcctcttacagttccacctcatttcctttcttttcaccctctggtgaagcagttaattgggcagcaaagtgaccaaaaggctggcgggaaaaagaaattgcagcaatagcaaagggcttaaatcatctgcaaactgggcagtcagcctccaactagtcgagaattggctggacccgtaagttaaatttccttccttgtaccagcaaaaagttatctctgagctgggaactagggtggcatggccactccttctactctctggggcaggtctggcagatcccagagctctcactgtgacaaagcgctaataaccgtctgctgcccggtggattcaatgttaggcccagggagaatcttgaaattatcagatgaaagattgtattattcttccatctagacatttgtccgactccataaccagaagactggccaggaagtggtgtttgttgccgagccagacaacaagaacgtgtacaagtttgaactggatacctctgaaagaaagattgaatttgactctgcctctggcacctacactctctacttaatcattggagatgccactttgaagaacccaatcctctggaatgtggtatgtgcctgaatgtaccccgacccaggtgagagtggctgtgccccaggcactggtggctctttttcaggggcatggggctcttcaccttcgccttgcctgtgcctcctataaataagcttgggaggtgaggcactgtgtgcagtctccataaatagtcctggggtcatgcacggggcttggcaacatggtacgtgcttaataaatattaagtgagtgaaggaagtataaactttgtgagtgctagtatctgtgaatttctataaacattatacaggaaggccgttttcatattatagcaggcactattggggttacgtagatgtgaaagttaaggccctggcctttgagatatggcatagctcatgggagggatgagatctgaattctgataacaattcaggatgatgtagaaaagtgaattgtacaatgtgcaaaatgctaattaactaataaccaacatttgtgtagcatgttgttgtttacatagtgccttcctgcatgcctcactttggattggcgtgatgagagtaaacgtcttgcaagacagggcatttgagcaaggggttgaagaatggcaagggtttatcagatctggggctgtggggtgatcattggggaagggcttgcagaagagctcaaggtgctttcagtgcaatgggagcggttgtgttttgccagagcacctgaatcctgtcaaaagcaggaggtgatgagcttggaaaggtagcagaggccaaattgcaggctttgaatggtggttgactcactttgcaagacaaaggggcagctgcgttttctcgtgtggtattcaagacttcttttcttctcctggacttcaggctgtttttgtacaagagcgcatactcatttctttctctctttttcaaatgtgactaaatcacacttcccagggacaccaagctgtttctgattgcaactgtaacagcctgtgtaccagctgggatttttgtattaagcagctctatggggctactataccagcagaaaattagaagtcttgctctaaaaagcattttcagcaaatacttgttttgttcttaaagtttttactgcctcaatttgtcagctaatggatcagaagtgattgggactgcctggagcttttttcagttatggtcttagatgtgagtcagagaatattatctattgagtttcacccacttctctgcccctgtgcttttacagactgtccttatttttctaggctgatgtggtcatcaagttccctgaggaagaagctccctcgactgtcttgtcccagaaccttttcactccaaaacaggaaattcaggtatatcccaaagggcctatccactaaacgtgggagaagagagggcaacaaagccctggacagtggctctgctccctttaacttgttttgtgatgttttatagtttgatcctcacaccctgtggattaggcagggtaaatggcagccccatccttgaactgagaaaacaggtttaaagagtccggtgactaacccccagaaagcagagagttgaagatgaaatcagaacctgagtctggttttcctgacatccggcaggttcaaccctcagaccacagcttattagctatgagcgcagatggttctagcgtttatcctccctgctcctgtgtaaatcagggctgatggggcgacaggtgggaaaactcacctgggagaacagggctctacttccttaggcaagtccttggataagcaagcctggtcctgtcctgcacgcaggactgttgtgagaatcaaagttgataacagatgagtgaagaaaggctttgaaatgtttctaaagccctttccaaaataaacacaataattgttaaacactttggatactggttaaggaaactgaggtggatccactcagtggactattttgcaatcttgagaaatgatcgtacttggaaacttgcatacgaattaatgttgaagtgtcaaaaacagactacctgctgtcattccactttaaaaaacaagtgctcaaagggtagagtagtaggattgttttcaaaactccttttcatattgatacagcattatttaagaatgtaaaatgcagctaactggtaggtgtaattgtgatgatgaagggtgctggctgaagtaggtggcagcagctgctatagtgttagaaatcctttaatggcagcggcagcaaagaagagcagaggtcaaaatttaggaacaggaggctcaagtggggctgtgtcatcatggagctggtttggctgggcattgacaagcagaaaaggcaggcacaagttgatacgttggaggaaaaatcttttttaaaaagttctatttgcataatgagttacagcttacaaagcataatcaaatgcactatttcatttggtctttagagtatctttacaagcctagcagggtggtcatggccctccccacccccaattttccagctggaaagtgaggtgaagagtgggaaagtgacttcccttctggtcacacagccatacgtttcagtttgggcctaaacggaggtctccagaatcccacaccattgctgcttctgctaggtcacactatctaggtgagcttcgtaaagagaattcatgtagaattgctcaggaaaaaacaaaaaacaaaaaaaaaaccaagaaataccatcagaatgcttgtcgagccttctggtttaactctggaaatcaaagttgggccaggcatggtggctcacgcgaatcttgctttgcagggccaaggagggaggatcacttgaggtcaggagttggagatctagtgagactctgtctctacaaagaatttaaaaattaagctgggtgtggtggcgcgtacctgtagtcccaactactcaggaggctaaggcaggaggatcttttgagcccaggtgtatgaggttacagcaagctatgatggtgctactgcacttcaacctgggtgacacagtgaggtcctgtctctttaaaaaaaagaaaaagaaatgagagcgggaagttcgtttagggcttccttagagccatggctcagggagagagggatgaattatgggtggaaagatctgtagggaggctctgttaccttttaaaaaggtatagtgttaccaccattagccaattaagtggggcagcagcatttgccagggccaccctaggaacccagaaacattgcgagtccagcgtcctgcctcagtcctgtcactcaagccatccatatacctgggcaccctctttggcactagccaaatgccacttgatggattgcattctctggcctctgaatggcagtgagtctttgaagggaataaagggttggccaagcagtgagctggggttaatgtagtctctgtggaagggagacctctgggatcaaaagccagcattgagaagaggcaaaaggccccatgcccacttgttgccaagaggttttagcctctgggcggcatatcctcttcatgactgacattgatgctttggtccccggtatacatggctgcccctactgggaagggcacattcttaagtcttcttggtgtgtctttcggcagcacctgttccgcgagcctgagaagaggccccccaccgtggtgtccaatacattcactgccctgatcctctcgccgttgcttctgctcttcgctctggtgagtggctgtaattagcgtgggcagcatgcgtctggcgccagacccagcagatgcattccttccaaaggaggctgtgttgtctggcctcagtaaagctccagaggggtccagcagctgtgacctgaattgatgctcaagacattttagaatgaccaaaagttcccactgtggaggagtggccaaataaactgccgcattaacaagtgggcatgagaaagtacctaacagccactaagaatgacaaaagtggatggactgtgatgccgtaggagggttcagatgagatctagtgtgaacagagcgagatccgatgctggtagctataaaaaacagcacaaaggctgtggatttcagcactgcttggggcagaaaaccagaaacaacctaaagttcataagatggaataatatgcagcttttcaaagaatggatagatttatatgctgataggacaagattgccaagatgtgttactgagtgaaaaaggcaaggggtagggtagtgtgtttagtatgatcctctgtaaagttttaaaaggtggctgggtgtggtggctcatgcctgtaatcccagcactttgggaggccgaggtgggaggattgcttgaagctcaggtgtttgagatcagcctgggcaacatagcaagaccccatctctactaaaatcagaaaattagaaaaaaaaaaattaatggtgacgtatgcctgtagtcccggctacttgaggagctgaggtgggaagatcacatgagcccaggaagtcaagtctgcagtgagccatgcattctaacctgggtgacagagtgagaccctgtctaaaaaaaaaataaaaataagttttaaaaggcgatatgtgttagtgttggtcatctctgaggagtggacattctggagaatgtagaggaagtaacttttaccttttctccttttcagtaccatttgaatttttttttttagccaattgtgtttttctcttttttcaaattataaacaaacatgaatgcatatcctcaaagctcagagaattttgagaaaacactcattagatcttacttttggaaagttgcctgtgttcctaattgttgcttttaacaaaagaattactgtttaaatctagataaatctagaagccttgctacaggttttcagaaaccagacctagggtatgggcacctgtccttacatttcagtgatgagaatttcaaatgacatggaacccacggcaagagcgtgaatgccaccagctgccggtgggtttatcttaccaattcttagagaacttagtgggggtgtcagttaccttataaatgcagtttctgacctttcagcttcatggtctcacctgttttaaaatagtagggtttgtcatcattaaaaatgatgttcaggtttgagttacacgagcccatttgagagcaggtgctgaatgcctttctaaagaaaaagggaacaagtttccccgagggcttataatagggtggttgtcacttggaagaattgcctgtccttctaggatgcatgaactttgaagccttggggctgttgatgggattagcattggcatggcttgtgttgcttcccttttaagttctaatgcctttttaatttatttctccccatcattcagtggatccggattggtgccaatgtctccaacttcacttttgctcctagcacgattatatttcacctgggacatgctggtaagtgccccaggctgctaattacctgtaacgtcctctgacatttagcctgcccacgcaaaagccctgttaagtagacccacaacctattacctataatgacttaatagcattacatttccctcttcctcctggccttttaggacagttaatacgaagataaacctgtttggtccatcacttagaacagctgtcattatattgggctttgttgtactgtgccactgttggcagaccatttaccctcagttaataaccctgtttatttccagagattactcacttatcgtatctttacattgagcaatcttcctggatgaagagcattaatgcagtttccaaaggttatctttccccacgctatcgatcttcacatttgctgccggctctgtctgtgtagtaatagaaaacagtcctttccacagtcagacatgctatcctgcatcgttctctggagaccttaggacttcaacagcctaaacataacaagacagtaaattcacaaatcacttaagcatttctgaggcttttgatgctattggatcaggggtgccttgcatttcactgtgactttaattttttgttcgttgtttttttttttttgagacagggtcttactctgtcacccaggctggagtgcagtggtgcattcatggctcactgcagccttgacctcccagactcaggtgatcctcccacctcagcctccagagcagctgggactccaggcttgtgtcaccacatttagctagtatttgtattttttgtagagacggggtcttgctgtgttcagagctggtcttgaactcctaggctcaagcagtcttcccgcctttggcctcccagagtgctaggattataggtgtgagccaccacgcctggcctgaccttaatatttttaaaattctttgcctctttcaggagtcactatctgtgcgcccatagtaaacagattctgtaggggtgcatagataagtctcttgaaattctaggcaaatgtctgtatttttctggggaaagagagagttgtgactttgatcagattattatggtgcagtggtccgtgacctcagaagtggttaagagccccgctgtagttcatccgtcatctgtctgggcaaaactgacaggatgacctttctctctggctcagttcctggatatgtatgatagccctctggggtcagaccgagaagaaaacctgaatataaatctgttgagagccgtggcttttcctgccattgtgctttttgtgcacgttttctcatttgattatcatcatagccctgatgagggtgactggggcaggaattatgatcccttttgacaaggtgggagaatctgggctcagagaagttaagtggctggtaagggcagggcctggaccaggccccagggctctccgttcccagctctgagcccttttcactcagccttcttcctgagtcctccttgctcccttcctagtcacagtggcaaattatccttacagtttgtttccccccataaaaaaagaaattattcatttatttatatcctgtttattttttatttttattttttatttttttgagatggagtcttgctctgtctcgcccaggctggagtgcaacggtgcgatcttggctcactgcagcctctgcctcccaggttcaggcgattctcccacctcagcctcccaagtagctgggattataggcctgcgccaccacacctggctaattttatatttttagtagagagagggtttcaccatgttggccagggtggtctcgaatgcctgacctcaagtgatccttctgcctcggcctcccaaagtgctgggattacaggtgtgagctcccgcacccagcctatttatatcctgtgtatttttgttaagaatttgaaaaatgaatgccaagtataacatgacagaggagttttaaacaaaagcagagaaatagttgtaagcaggaacatggcacaggtcgctgaagtccaattgttacccctgtttgtgggtgtgtgtgtgttttgagacgaggtatcactgtcacccaggctgaagtacagtggtgtgatcaagctcactgcatccttgacctcccaggctcaagcgatcttcctacctcagcctcctaagtagctaggactacagacatggaccattacgcctgactaattttttgaattttaatagacacgaggtctcactgtgttgcccagggtggtctcgaactcctgagcaatcctcctgcctcagcctcccaaaatgttgggattacaggtgtgagccactgtgcctggccacacacttggccacagctgagaggcgaatatattgagttagctactttttggcatcagagcaaaggaataaaacaagctggtataggagtacagaccttttcatgatccaacagttgctatgtctaactttcctcaaccgcagggcatcattatgtttcatttaattggatgtcatgacacctcttcttgcagctatgctgggactcatgtatgtctactggactcagctcaacatgttccagaccttgaagtacctggccatcctgggcagtgtgacgtttctggctggcaatcggatgctggcccagcaggcagtcaagaggtaaggccagacatgagccagggatctagagtagggttagaaatactcagctctgccggcctagctctttgaagggtaggtggcaaaatgatttgtgttcttaggggcaagtctgacaccctaatctagcccagtacagaagccagaagcactttgaagtcagaaaagagccttagtggtcagctttgaatgtattacaaccattgtaattgatgccccaatacaatagaatgagagaggaaaattattagctttatgaagatgaaaatgcattcatagatgtggcagaagattaatttgttagctgtgtaaaaattctctgctgctacagagaatcctgccctgccctccccaccctcaacatgtccccgagagctgctcctctgtaaccctcacagctccaggagcttgtcccggaagcacgaggtctgtgttatttcccacagaagctgcagcaggttttgcagaggctcccagcaaggagtatctcctcagtagcctacaccatctccccgggacccagacaaccttagagtcacatggatggtcagacagaccttgacatgagggcagcttgctggcagcttgactttctaaacagaattggaggcaaatttaaatgtcacaaaggtgtttctcattgatttgactttattagaacctgagtgatttcagacacgcaaaggccagtaagaacagaattgctttcacctctggaaatcgttttcagatgtgccgctttcttctatccaggacgtttgctggaagaatgtaactcaatagtgtaccctcaacgtggctgccagttagggtgctgggatcagagagaggctttttcagggagaccatcagtgggtgggagaagatgtctcatctccgcccgagtctccattgtgagctttctgagcatttcaccatggagactcggcacagacgtgttccttggctttcctgtaggaatccagggcccaccagagcttcccttagcaccagcagtggcagctggttcattttgccaccctccagtagccttttcctggtggttctgcattgtacctgagaaagagccaggactcagttgcttttgcaaagcagaaccctgttcccttgcagcacctgcctgggcccccagggagccaaaagactgctctgctaagttctctcttttctggaagttgctcactcgagaagaatgaaatctgcccgccatggtggcttatgcctataatcccagcactttgggaggctaaggcgggaggatcgcttgagctcaggagttggagaccagcctgggcaacatagtgagacctcgtctctcaaaaaattaataaaaattaagaaaaaaatcaagacaagaattgagtagaaaccatttggtttatgttctgcttagcaggagttcctaatctggaatcctaaagttgtatgcattttatggggagagagactatggtttttatcagaatcccagaaggatcagtaactcctccctctcccctgctcatgtattcgattcaaaaacttaaagcccactcttctgtggccctctttgtgagtcctagaatgaactctaccctggaaaaatcagtgaccctaatggaagctctggttgggtgtttgtcatttctttcctcagctgatttctcccctcactgtcctttcttgattctcaaaccctctttcctttggcaggatcgctgcagagcagagcagtagattggcaaaatataggacactacggtaaagatgaagggcggactcatcccagaagcagggtcccttccccgtcttgcccgcctcatgcatgtcagttatctctctagttttcagcccacttgctcctcccacccctccctaagccacagctgaattctgaggctgcttttcaacttgctagatgaggttgtgactggaccagggcaaaagcttcctgagttagcccagctgatgggataactttgcagtgagcagctttggcctggctttgactgtataagacttcattctcccttatatcccgtggggtacttacttatttatagacaagcctctctctctgtttccaggacagctgagatgaggataagacaaatccaaaattcattaaatgacggtcccatggcaaatcctggcacaccttgtcactgtttctagacttttctgtaacaccgatctctagttgggctaaacattgtggtctggggagactgtaatttatgaaggactgatggccacagatcaaagccagcatcagaatccaggttcctagcactcagggtatgttaaaagggctgctccccatgtgactaaaatgtgaagtgagattccactcattctccttctgcatatcagtcctaggatgggagggaagtggagggaaggagaaggagagtctgatgcttcactgatctgctccgctagaccagggtctggcaaaagttttctgtaaagagccagacagtattttaggcttaactggccatatggtctcttggcaccaactactcaactctgtcactgtcatgtgaaagcagccatagactgtataaacaaatgggtgtggctgtgttccaacaaaactttattcaccaagacaggtggtgggctggatttggcctgagtggcacagtttgctgacccctgccctagaccaacaaagggaggggaggtatttgaattttcaagtcatgttctcctttatcctttgccttggaaatggctttccctgccaaagccacaaaaccatctaatttctaatcctctgaaaataggagagatcaacaaaagcatagtatttggagcctttccatggatgtgtgagcataagctgggtcacctagtcctcaacacagaagggaactgcatttgtttgtttgtttgtttgtttgtttgtttgtttccaggtttaatggagttgtaatttatctgcagaaaaatgtaccctttttagtgtacaattctgtgaatcctgaaaaacctctgtagtcatgtagccaccacctcagtcaagatataggtattgccactctccagagagctccccggtgccccttttagagtccgacccttctcccacccccactccctggctatgcccgtttggtttcatcctacattatagtcactctgtctgagatttgctttcagcaactgtccttgctgctacatgttgagttctttaattctttaaataagtcgatttcttttcttgattaaaaagaactttttttatagagatggggtctcattatgttgcccaagctggtctcaagctcctgggctcaagcaatcctcctgctttggcccctaaaagtgctgggattatagacgtgagccaccttactcagtctcttgagttttaaagtccgttcccaccctgctatccccaaatcattgcttgaggaagaggaaagtcacttgatcatttggacatttggcatttcctagcatttgaaaggaaaccccctggtagcaaagtgttcttgatctgagggcagacattgatttgagcagacataatgtgggacgtaagttctagccgcagtcaagagttgtgggccactacccttcggctgttcttatttcatactcatgccatcctttctgcatgaacatttctgaatgcccacatattagtgtacctaagaacctctgaatactggcaaggaattaggggtgcacaccccagccctcaagattaattccatgcctgtgcatgtcttttggaactgctttattaatgggtttggagtctgccattctgcaagactggatcattatcaccttagtcctcacccctgggaagagctgccactgaaggatggtgtgtgtgtgtcagcaaccctgcctctgcttgctggagcctgctgggatcagttactcactgcagtcacctcctcagcttcacagtctgtctagattgtcattttcattcattgtgcttccccatccctccttagagtctagggaaaggcagcggaggggaaacaaagagtacaggagataggttcttatcccctttaacactttctgtgagctgagtcccatttttgagaatctttctgtgttaggttagatgctgagtgtgacttggcaagaacacggccacacggcaggaatgtgcaggtttctgtaatgaatggtcaggatgtcatgttctaagctacagaagggccaagtgttggttggcagagctggagtctgggagattgatgatgagcattatttaaactttgctctttgttcatctaattgaaatttacactgtgtttttggccttgcactgtgagaggtgtgcctggaattacctcatctccttatgttgtcacataccactttcttagttattattgagtttgttttgttatttgtatttaagttgtcatcagcttaattatgaactagctgtctcacattcttttgtaaaatgagatggggcatacataaatagacttgggagataaatgattattcccttataaatgggatcttagagcgggagagtaccttagtctctctgttgtcaccagttaggaactgtaactgtgaactgaaaccttcagtaattctgtgtttgtctccattttctttcagaacagcacattagttccagaagaaagatggaaattctgaaaactgaatgtcaagaaaaggagtcaagaacaattcacagtatgagaagaaaaatggaaaaaaaaaactttatttaaaaaagaaaaaagtccagattgtagttatacttttgcttgtttttcagtttccccaacacacagcagatacctggtgagctcagatagtctctttctctgacactgtgtaagaagctgtgaatattcctaacttacccagatgttgcttttgaaaagttgaaatgtgtaattgttttggaataaagagggtaacaataggaacaaaggcctgattgagagcttattctcatacttttgggtggtggggtccttgggtatatgacatgaggacttagttggaaatgctgttgatgccagcatatttctccaggcctttcttggtccttcttgccccttgctcctaacagaactgagaactgcctggaaaggccagcttccttttttcttctccagcagtgagcaccagctgtctgcataggagccctgttggtatctgaaggccccatttggacctctaggggtccaaggggataggtttttatcccctttaacattttctgtgagctgagtcccatttttgagaatctttctgtgttaggttagatactgagtgtgacttggcaagaacacagctaaacaacaggaatgtgcaggtggactgcagctaggacctctgctcaaggctcttgtcttggggccaggcatggaggctcacgtccgtaatcccagcactttggaaggccgaggcagggggatcacttgaagtcaggagttttgagaccagcctggccaacatggtgaaaccctgtctctactaaaaaaccaaaattagccaaggggtgggcatggtggtgcatgcctgtaatcccagctacttgggaggctgaggcaggagaacagcttgaacttgggaggcggaggttgcggtgagccattgcactccagcctgggccacagagccagactccatctccaaaaaaaaaaaaaaaaaaaaagacttgcatggagatttgttgcaacatgaattttcaagggacacaaattcaaaccatagcactgaccacttgagtgactttagtctagaaggccacatctcaagaatgccccctctgaagttgtgcccattacatgaggttatataatagcacagagagaagtaatactgcatagcatggttgactgcgtagactttggttccaggcaaacctagtgttgccacttactagggtgagggaccttgggcaagtagtttaacctccgtaaacctccttttgtgtttctgtaaaagagagatgataactacctacctcataggattaaaggagttgaatgctgacgcagcttagcacttggcatctttcctgattgacctacggttatgtgccttggcccattgcctctagttctagaatggcaaaaactgcaattacttttgcaccaacctaatattaattgaaacataataagtttagttaacttgtgaaatatggtaatcctcatagtatttattgaattgggggtctggaagttgttttattttaatcagattgcttcccaactagctggaccttactacagtgaagaaattgggattttgattgggaaaaagggaaagaagattctagaactctatgccgttctgaatgggatcctataggtaagaggatgatgtgggcagttacagggatgcctctaagatgggaaggaggcttctccttcccagaggttgcaaacttgtgatctgtagtgtttttttaaaaattgagtaagttgccaacatttgaagacagattttatataaaaatcttggttttggattctggattctcctgaaagagaaaactagagctgtccacggcgggcctgattcctgaacggcagcagtcagctgacactgaatagcagctcgtccctttggatggagcctgcaagctccagcttgtcagcccctccccgcacaggtgtccacatacaggacacttgcgccagtccacctggcgactgtgcttctctgatacctgcctggctcccataggcatatacctttgggatcctccactttttagtttcttatcccactcggaggggaaggggtgatggtggtttcctgttgctcttgggcggctcctagtgttcctacttaggtgtgctgggacctcagccgctcagactggagaggaaagagagccccagcagcgtgtgggatgagagcagggacacttgccacctatcaccagacctgtgcgggcctggaagacagactgggtgcggggctggtggacagtggtgtggagcaggggtagtagggcctgagggtggaagtacaaaggctgctgggtgtcctggtcactgggaacaaaggacagccagtggctggaaggaaggaagtcgggaaacagctttttggagaaacggctggcacagctaagtaaggggttcccgggctggtttggggctggcctgcagactcagatgggagctggagaacagagcccagtaaacattgccatgtgccaggctgtgttctgtgtccagagctaccacagggagcaagacagatccagtcccttcccttggtccaggtacagcccacgggcacccagctgagggagaaaggaagcagtgatcacacatgtgagaagggcctcagaggaagcagttcttaccttgatggcttgggaggtctcagctgagacctgaagaatgagaaggcgcctatgccaagctgaggaagagcactccggccagagaatcagccagcatggaggctctggggcaagagcacggcacattctgactggaagcaggccaagcagccagggtgtcactggcaggaacggcatcctcgctgggatagaagccagaacaaacttggcttttaggggctgtggtaaaggggactgatttttctcttaggaccttttttaaaacaaaacaaacaaagagatggggtcttgctatgttgcccaggctgaccttgaactcaagggatcctcttgcctcagcctcctgagtagctgggactacaagcatgcaccatcacgcctggccagcctgagttttattttggggtatagcagaggcagatgctgtctgtctgaccctgcccactgggcaaagcctttttttttattttttattttttattttatttgagacagggtcttgctctgttgctcaggccagaatgcagtggtgcaatcacgactcactgcagcctcaacctcccaggctcaggtgatccccccacctcagcctctggagtagctgggactacaggcgcgtgccaccacactgggctaatttttgtatttttggtagagatgggattttgcaatgttgcccaggctggtctcatactcctgagcacaagcaatctccccgacctcccaaggttctaggattacaggcaggagccactgcacctggcctcaaagcctcttaaagggactcggctctcagtgctggagcagtgctgcaggggaataacctggttgctatagccaagacagtctgggagtccagagctgacagcaggcctctctcttataattcatgaaatccactggattcatcactcaaatgattcgctgcagtagcgcctgggcctggccttctctgaggagtacaagacatgccagctttagagtcagagctgcttcgagttcccccattagctgtgtgtccttttgtacctttacctctctgggccttggtttcccatcagtaaaaatggggatcatacctctgagggttttatagggattagaggaggccacagccacaacacataccacagtgcctgacacttagcattgagtcagtgtttgctcccaatagcgcagatattgtcatcattattatttcccaggtggtgttaacaggagcccagtcaacagtttgtaccaggtctacattcacctgttagttcaagttactcgacaccccagctccctcatttcctccccagcatttcctgaggggcctggagtcttaaagcaaccttttcgagagagtgttgccttccctccccgccccatcagtcccgtcctgccaacctggagcgactctagttgaatctgacctctagttggatccagctgggccaatgtgccctgccctgccttcctcaggggcctgttgtagagaacaaatgaagtaatggatgggaagcctctttgtgaactctaagttaatacaaacagaagagattatcattaaaagcgacaagtcccccgttgattagagcatttctttagggagaaaaatagcactccgtcttaagtaggaccctccccggagtgggaagctcccagctcctctgcggggcaagtggagtctctccgacgccattcgtgccgtggttaatggtatggagcactggagttgttgctatggtggtttttcccctataattgcattcacctccaaaaccacaagtagcagcaggtcccagcagtcgttattttatttgaaaaactaattggaagttgaaagagccctcggcttttgcttttgtcaggataggccaaggaaagagatgagcaggtgggtctgggaggaaggagggggtcttggggcaggccgggcgcgcctcccattcacagccccttcctttgtgcctgcctctcttggttgaagtgggccacctgccctctaaggccagccttttcctccgagggggcttttgtctcccattgttctgattgtctcctccgtggagccgcctcagtggccccctgcagacggtttcccaggcttcacgttttttttctcaggcgcccagggagagcaggtggtctttaccctggaaggaactgagttggttatatagttctggtgctgggagaccagagacctggctgccaggcccttcgagcttgggtcattccttccctgacgacactgtcttaggctacaaaatggagaggtgggattgttcactccatcaatgttaagatgctgtgattcttttcgcacttttttttttttttttttgagacagagtcttgctcggtcacccaggctggagtacagtggcgtcatcttggctcactgcaacctccacctcctgggttcacgttgattctcttgcctcagcctccctagtagctgggattacaggcccatgccaccacacccagccaatgtttgtatttttagtagaggtggggtttcaccatgttacccaggcttctctcaaactcctgacctcaaatgatccgcccgcctcggcctcccaaagtgctgggattacagacttgagccactgcacctggcccctctttttgcactttttaaatcaaaacagacatcccatcatctagacttttcacagttgtcaggttttttttaggtttaatttacgtacagcaaaatgcacagatcctaagtgaacaacccaatgattttttatatgtgacaacactggtataaccaccacccaaattgaaatatagaacatttcagtcaccccagtaagttcacagattctgatcagaggcacgcagagggcaggtgatgtgtggcgatatttggcccagataaaatggctcatgaatagcaagagttgggtaatcactgatgcgggagcctcgggtcagtggctccagttctctgcttccctttatagcaaaatttctcaaaaaaataatctctaccagcgctgtccaatagaaatacaaagcaagctacataggtgattttacattttctggaaaccaagataaaaaagttaaaaagaaacaagtgaaattaattttaatatattttatttaacccatatatctaaaatatcattttaatatgtgatcagtataaaaatactgaggtattttgtattttttcatattaaatctgagtgattcctacttggacctttaatctgtggggtgttttgttttatttattctttttttggagacagagtctcactctgttgcccaggctggagtgcagtggtacaataatagttcactgcagcctcaaactcctgggctcaacaattctcccacctcagcctcccaggtagctgggactgcaggtgtgtgtcaccacgcctggctaattttttttgaatttttatttgtagaggcagagtcgagctatgttgcccaggctagtcttgagctcctatcctcaagtgatcctccctccttggcttcccaagaatgctgggattgcaggcatgagccaccatgccccagcctaaatccagtgtttattttatacttaaagtacatctcagtttgtaccagctacatttcaagtgttcgttagccacatatgtctaggggccaccctattgcacagccaaatctatactcaccagctctgattcctcttctcccatttctcccactcaaatcagactttggccttcactacacctgatttctctttgccaaggtcatcagtggcttccatggtcacttccatggtcagttctaaactgacttgtcccatcagcagcatttagcagagcagatcacccctttcttctagaaacactcttcattggcttctgggattcttctttgaaggagttttcctgttacttcactgcctgctacttctcagcctcctttgctggttcctcatctttcctcaaaacttttttttttttttttttttcagacagtcttgctctgtcgcccaggctggagtgcagtggtgtgattttggctcactgcaagctccgcctcccaggttcaagtgattctcctgcctcagcctcctgagtagctgggattacaagcgtgcaccaccatgcctggctaatttttgtatttttagtctagagacaggatttcgtcatgttggccaggctggtcttgaactcctggcctcaagtgatccacctgccttggcctcccaaagtgctgggattacaggcgtgagccactgcacccggccttcttctaaactttaaatgtagggtttccaggggatcagtccctggactttactcttcctatattcttccttagtaatctaactagtcttttgactttaaagaccgaccgtctaaatggtgacaactaccagccaaaccagctgtccagacctctcccctgaactcaggggactctctcctgaactaggacctgtacagccatgtgcctactcaacttcctcacttggacctttcataggcacctcacactcaacattcaaacctaaactcttaatattcccccaacccccaaagctgctaagtggcaactccatcctcccatcctccatccttgggccaaaaactcaggagtcattcttgacttctctccaatccctacaccctgtctatcagcaaatggcttccgccctaagaatgtatctagagtttgaccatttctcagagtgattttcagcataggtcacagcatgtcattcttctgcttaaactccaccatggctttcatctcaccaagtttgggatccaaatccttactgtgaccttgttaaagaacatttatgggaggccgctgttttgaactgagctcttgcactaggcgggccccaacaaaccagacccaaccagaatagagtcacccatgacatactaagtgccatgtcatcaaacagaactttaaaatggtccagttttctgaaatatgagattcacagcagccaatcagaaggggtccagttgggacaggcacagtggctcacgcctgtaatcccagcactttgggaggctgaggcgggtggatcacctgaggtcaggagtacgagaccaggctggccaacatggtgaaaccctgtctcgactaaaaatacaaaaattagccaggcgtggtggcagatgtctgtaatcccagctactcgggaggctgaggcaggagaattacttgaacccaggaggcagaggttgcagtgagctgagatcatgccaccacactccagcctgggtgacaaagcaagactctgtctcaaaaaaaaaaaaaaaaaaaaaaaaaggaaggggtccagtctactttagcttgcataatcaggaagtcccctctgctttaaccccagaaggaaggtaactttgaaatgaccaatctgcttttcgtgccctgtttctgcttctttagcccctttttgcctgtaaggcccactcccactcagcttatcagagtccccctcaggatgctgcccagttcatgaactgctaacaaaagccaattcaatctttaaaactctatttgggttgggggtggtggctcacacctgtaatcccagcactttgggagtctgaggcaggtggatcacctgaggtcaggagttcaagaccagcctggccaacctggcgtaaacctgtctctacttaaaaaaatacaaaaattagctgggtgtggtggcacacgcctgtaatcccagctactcgggaggctgaggcaggagaatcatttgaaccctggcggtggaggttgcagtgagccgagatcgtgccagtgcactccagcctgggaaacagagtgagactccatctcaaaaaacaaacaaacaaacaaacaaaaaaaacactaaagagtcaatttgttcctttttttttttttaacacctccaagtgtccccatgagccggcctcctgctcctccaggactcttttctttccactgacatccttgctctggcccaggtagccacattgatccccttgctagtccttccacactgctgcctctaagcctttgttgagttttcactctgcctgaaatgttctttactctgatatttacaaagccaactccctctcttcctcaggtctttactcaaatgtcacatcatcagtgaggccttcacatatacacagtgtagatcaaattatacccccagcactccctggccctttaaagctttatcctttgcacttgccaacatctgacatattctatattgacttgtgtttattattctctcccccaccacacacgcattggaatataagctctataaggtcagggactttgttcatgactatctctccagtgcccagaacagtacctggcacagagtgggtattctataaatgtttgctgaatgaaggccgggtgcagtggctcacgcctgtaatcctaacactttgggaggctgaggcaggcagatcacctgaggtcaggagtttgagaccagcctgaccaacatggagaaaccccatctctactaaaaatacaaaattagctgggcgtggtggcacatgcctgtaatcccagctactcaggaggcgagggcaggagaaacactggaacctgggaggcggaggttgtggtgagccaagatcatgccattgcacttcaggctgggcaacaagagtgaaactctgtctcaaaaaaaaaaaaaaaagtttgttgaatcaataagtggtattgcttatagaagagcaaatcacacgtgggtgaaggatgactttgatcgaagttagttgaatgtggttaagagctggttctgagttggacttgcctggatttgaatcccagcgctctcatttgcacggtgtgactgtgggcaatttggttacactttctgagcctcaattccttgtctgtgaaaggaggaggataccagtaccctccatcagcctgtgtaaggagcatatgagatcctatgcatgaagctgcctggtttgcactctgcgtgcttggtaaatgttagctttaaaaaaaattacacctcgtaataccactttgggaaatgtaactatgtaaaacacataaaaaattaggctgaagagaaaagaacatttaaatgcacaccggtatgggggaattttattgtattttcaaaggaaaaagtgggtcagaaatgagaggattaactggatccagttgcattttggctacaggtagcccgggtcacaggaggaatcttcatccctgggagttcctgctgcagaaagaaagatcaagctcaatccggggaattgaagtaagggtggctagagtgggatgcatggaaccagggtgacgggtgctcccgtgacaggagctggccttttggattccaaaagaggcagtgtggggtggagggaaggatgcgcaagcatgccagcaaggcgagtcccaggcttagcccctgctctctgctctgccagccaactcccaccgagaccctgggccagtcacttcgccttgaagaagcttcctctaatccccagacaggctcagcgttctcccagcctcaccatcaccactccccagcatctcttcccattcatcacaatgaagtaattgactgtacaagaacgtgtctagttccttgctgcttcggtgtgttatgaattccatgagagcaggggtcgctgctgtcctgtaccctgctatgcctctggtccagagtgtggcatgtcatagtcactggatggtctttacaggggtgggaagatggctaaacccgagcctcagtttccttacagggctgttacgtggacacaatgtatgatggctgcaaaagtgtgccatctgtcacatggctctactctgcactctaaagcaggaacttattcctgctcaccagtgatatcctggtatttgcagcagttgagctggagggggaacaatggctatagcagccttcggggcccttcctgccagctctgcgggctctgtgatttcaatctccgtgaagcctctggcttttaactcgcgggaacaaagcctgcattcttaggattagccctccatggagccatccaccctactggggcctgatgagagccatagcaggtgaacaattacttaatcccagcctgcaaggcacagaggaggccttcttcttagagacattatttttgaactcttgtcttgcggaccctagagatggtaagagctaacccctcctttcacagagtcgaaacgaagaagtgtgttgctgtgccgctagttgcagaaacaggcctggggcccaggtgttcttcccgcctcccagactggttgtcgcctctcctgtcatctgccgtaggcctggtgctgcttgtaggtggtgaaatctctgggctggtggtgtctaatcgggttgggaagaaggtgagagaggccatggagcgctctgctgggaactggatttgcttaatagcttggaccagaagtgcccagcagagccacactgggacctgcttgtgctcgcagttaaatcaggctctaggccgggtgcggtggctcatgcctgtaatcccagcacttagggaggccatggcaggtggatcacctgaggtcaggagttcgagacaagcttggccagcatggtgaaaccccatctctactaaaagtacaaaaaattagccgggcgtggtggcgggtgcctgtaatcccagcactttgggaggccatggcaggtggatcacctgaggtcaggagttcgagacaaacttggccagcatggtgaaaccccatctctactaaaagtacaaaaaattagccgggcgtggtggcgggtgcctgtaatcccagcacttggggaggccaaggagggtggatcacctgaggtcaggagttcaagaccagcctggccaacatggtgaaaccctgtctctactaaaagtacaaaaatcagccaggcatggtggcaggcgcctgtaatcccagctactcgggaggctgagaatcacttgaaccctggaggcagaggctgcagtgagccgagatcacgccactgcactctagcctgggtgatgagagtgaaactccatctcaacaacaacaacaaatcaggctctaaaccccagcagagtttctccaaacaaccacgacatttttgggaaactttgcccatgaagtgggggctttgtgcaaagaagttccagggaggcaaaacaggtctgggcctgccattccctgacttggggccagctgccgccccgtctttgcctcacttttcctcctctgtagactcccaggagaaacgtgagggccagtgagctggggaacgacagtcatcacgtctctcgtctgctgatcgtgtgtctgcgcacactcatctaccacagggtgtgggagggctggtctgtctttggcttgatagttttttgaacttggcaagggaaccagagcatgcctgtcagttcacctgcagccgaatccttgggaacacctgttaaaattcagatttctgggtcgtatcacggaaccatttggtgagtaacatttttgggcatggacactgagcctggcctctggctccgcactgggatacagccatggataagatgcggtctccatcagacactttccacccttcatgactaaagaactctcctaatattgattgattgattgactgattgagacgggatctcactatattgggcaagctggtctcaaactcctggcctccagtgatccttccccatcagcctcccaaagtgctgggattataggcatgagccactgcacctgggcactcccctagttcttcttctttttttattttagacagagtcttgctctgtcacccaggctggagtgtaatggtgcgatctcagctcactgcaacctccgcctcccagcttcaagcgattctcctgcctcagcctcccgagtggctgggattacaggcgtgagccactacacctggctcatttttgtatttgtaatagagacagggttttgccatgttggccaggttggtcttgaactcccgacctcagatgatccacccaccttggcctcccaaagtgttgggattacaggtgagccaccatacccagccactctcctagttcttaatgtctgtcaggagggtccttgttcttggtttgtttggcagagccccataccttcagagaggagtggattttttccttttcctggcaaaccacggggtaggaagccctgaagtccctagatgcacccatgcacacacacccatacctgtgcttctgcagcagggccaccaggatgctctccaattccatttgcttttgttctgcccacatgctgtctacctgacgaccaagccgtgcccttgctcctcgctcttggttgctctctctgtgtggttagaaaaagagaactagttgctatttgggtaggatgtggaaaggcaggggtatatccctatgcctatttcaatatctggtgtggactcttctacccaactgaattagattcagccacacttagggaggcagtatatatagtaatgaagagcacagaagtacaagtgtacacagttgcaaaacgtctccccacagattattaatgatagagggaaaaataactttatagaggagaaacctagcagacaccatgttaaccaactgatcaaagttaccatctaccaataatccaccaataatggcacaaattgccatcctgtgcctcctgataccaggcactgagaaggacacaacactacttctgtgaatgcatcacctgattcctctaatcatcattagaggaacgcatcctctaatcatggggatatgtctggcaaattcaacatgagggacattctataaatcattagcctttactaatcaaaactgtcaatgtcatgaaagactgaggaacgattccagattaaaagaaactgaagggacatgacaactaaatggtatccatgatcctggattgggtcccagatcagaaaaagaaataattgttataaaggacattttgggacaactggtaaaatttgaatatggattataattgataattatattatgattatgtaaggggatgtcctttggttaggtattaggaaacacatatagaagtacctaagggtaaagggtcatgatgactgcaatttactctccaatggttcaacaaaaatgataagaatacttaatgtgcatatgtgtttctgtgtgtatgtatctatatctagctatagatatagagtaagcaaatgtgataaaatgttaggaattggaagtgtatatggaagtccattgtgcttttgttgcaacttttttgtaagtttgagatttttttcaaagtaaaaactaaaaaacgtataggctatagagtcaggcagtttggctccaaactctgccactctttgtgtgtcctttaaaagctattaaccctgggccagggcgcaatggctcacacctgtaatcccagcactttgggaggccgaggcgggcagatcacgaggtcaggagatcgagaccgtcctggctaacatggtgaaaccccgtctctactaaaatatacaaaaaattagctgggcatggtggcgggcacctgtagtctcagctactcgggaggctggggcaggagaatggtgtgaacccgggagggggagcttgcagtgagccgagattgtgccactgcactccagcctgggggacagagagagactccatctcaaaaaaaaaaaaaaaaaaaaaaaaaagagctattaaccctgtacaatggggataagggttgttatgaagattaaagaagaaactaaaagctgggcaaggtggctcacaactataatcccaatgctttgggaggccaaggtgggaggatcacttgaggccaggagttcgagaccagcctgggcaaaatagtgagaccccatctctacaaaaaataaaatagtcagttgtggtggtgcacactggtagtcctagctacttggtaggctaagatgggagggtcgcttgagtccaggcatttgaggttacaatgaggcatgatcattccactgtactccagcctgggcaacagaatgagaccctgtctctaaaaaaaagaaagcaagaaactaagaataatagtagctgacactaccaagggcatctgtgtgcccagcactgtgccaagtgtctgtaaatgtcctagggcagagcctttgtttttggcatggagtcatgattaaatggtaactactaccagtgttgttactgtcggagcctagcctgaagagacacgtggtaggcatggaggtaagttgaggtttaacgctggaacccttttgctatgggaagtccagaaatgacacttgctgtgccaaggaagagatctgaattggtccctggtcccctgtagggaacaagctcctgcagactctgctgcagggtgtgggaagaaatcactagaactcctgcttacccctgctgcctgctcatgatgtcctggagcagcttgcgggcggacagctggcccagcaccttccggtagctgttggtgaagatggcatctgcataccgccgcatcctgtgcggaaggagtcaggggtcagagggcggggtggaggccaggcgagaggacagtcgtggctgcactcgccatgtctctgcaagatccttctgttgccatctgtcccactcaccccaagagagactcagacccctctgagtgacctctgtgaagctgtgtctgcctcctctgcaaggacgggcagtgggtgctgcctggagacatagccagggcccagctgatgggctgagtctgcattcactaacgcctgccccatggcagggatggcttgggagtggtgggaactttccccagggtctgcttacctgagggtcaaagggggaggtggggagcagtgggagctgttgctgagggtgaggatcacaaagaagaacacccagagtggcatccttcacccggggtggcacctgcagagtgacaggaggggaaggtcaggtacagccacagccattgggatggccttcactggcccagccctgggcttggctccatggcaagccttggtccttggtttttggaagctgtgggatgggaaaaagaacccagacactggaagtcagacagacctgagttcatgttctgcctctgccagccacctgctctgacttcattttctccatctgtagaatgggcgtgatggagctcccctgccaaccacatagggttgaaccaaaaaccagtgatagtagggaaatttccccttgccataaggtattagaagtaggatttgggctcaggcacagtgactcacgcctgtaatcccagcactttgggaggctgaggtgggcggatcacctgaggccaggagtttgagaccagcctggccaacctggtgaaatcccatctctactaacattacaaaaataagacaggagtggtggcgtgtgcctgtaatcccagctactcaggaggttgaggcacgagaatcccttgaacccaggaggtggaagttgcagtgagccaagatcgtcccatgcactccacgctgggtgacaaagtgagaccctgtctcaaaaaaaaaaaaaaaaaatttaaataaatagaataaatgggatcccttagcaaggaatggggaaggtcaaagaaccttctctcagtgcccctcattcaaccccatccagtgtggcagtgaaagcaggcagcaagggtaactgctcagctctgagtcagacaaactggaagttcaaatcctggctctgctgtcattagctgtgtgtcccaggacaagtggcttcacctctctgagccttattttccccggccataaaaccaagatagtaactagacctcctacttcggctcctggaaggatctggtgaggtaagtgcctgaaccaatagggaattctctagaaacctttgctgtgtctacctaagaccaaccctctcagagggcaggctcttcctgttttaattttgtttggagttggagagaggggagaagggctctaagtcttgctccagatgcttagattttgctgaagagttttagtcctggaagagactgaagagccgggggatccagtgtggcgcagtcatctcataggtcctgtaactacccttaattggggcctgcggacagcatgctctgcaattaggggaaaaacagccagcaggggacagagcccgcctccgctggggcaagtgccactgctgtcagcccagacctgcccaagcatggaaacacggctggcctcgggggacttggccacctaggaattgggtcctcccatctcccatgggtttctccctctctcagcaggatgtctactccatgggggtgtagatccatccagaagcccagccagccccggaggtggccagcacccccgcctttcccacaatctcctcacatggcttccttctctcccactcctgggtcctgctgaggagttctggcaggcagggccagcactggcagaacccaccttgctctcccggccctctcagggtatcaccctcctttctgaaggcactgaagtctcctctaacccagggatgccttgggcccccaggcagcactcagggggtctgcttactgcagcctgagaccctgtacctgcagagctggagggagcagcagcccaggcctcagtggtcagcccctccctccatgacatgagcatccccacaacacgcacactggctgtcctccacttcctgctcgagtgagcacttgctgccagcgaatgacagggatctcactacccccaggcccgggagcttatttccagatggttctttatttatttattttgagagcgggtctcactctgtggcccaggctgaggtgcagtggtgcaatcatagctcactacagcctcaaactcctgggctcaagcaatcctcctgcctcagcctcctgagtagctgggacagcaggcatgtgccatcatgcccagctaattttgaaattttttgtaaagataaagtctcactatattgccgaggctggtttcaaacccccgggcttaagtgatccccccgcctcagcctcccaaagagttgagcttataggcatgagccacaatgccaggcccaggcagttcttattgttaggaagtttgtctcaccatgtcaagcccaaatctccttctcctgcaaatgtttgttaagcctctactgttccggtaaggactggggctagagaaaagatgagaacacgggatctaccccgagggctggctgtgtaacatccgcctgctgggctggagcctctgcacctacagccacacgactggtcctttagatatgttccgcatgtctgacttaagcttttgttcctcagaccaaggctcggcaggcttccgtcctcctcatcgcaccataccacgtctggtcccccttctccccacctggtccaggctgcctctccagaagtggaatttcctaagccgagagatctctggatgcaagcagggccccttgacagaaaccactgccttttctgtctcccagctgcagcctggctttcttgccttctttgctgctgatcttttaaagattcaggcagatctaggtccccaatcacctccctcccctgctcagaagcccttggctccccactccttccagaataaagctcaaaccccttctcttggcttaagctctccctctgcctgccccttctcccaagggctggcacaagtgattcccagcccctgtgccctatcaggctccacaacccatccttgcactctccctctggagcaggcatccccatgctcctcttacagccaaggaaaagagcctagagaggacaaggacattttccatgatcctccatcaaattagttttggagtgggcacttcagagtgggcctcctcattcccaggccggcagacttccttccgctccatgcagcagcctcccaggtacaatgctctattcacagtattccccattcacagggatcctcagcctccatcacctgcacgtgggaaagggtctgaaaaaaaggaaagcttcttgctctttgttgttgggcctctggggaagaaagaacagggacaaacaggaacacctgcttgattggcccctccctatgcacacccagtagtttcagggagttgaaacaacctcataggagggcagactttggtggggagggcaagtcatagtaaacacaataccccgctcattcaagataaggctcagcaactgcacaagttaaccaagaggctcaacatttgccacaaatcctgtgccccaggcataggtcaagaccccacagcaacctctgagctatgagaaccgaatccatgggtttgcagatcccactggatgaaaatgggaaacaagaattatccagtgtagggtaagataagaagaatagaggttatgtcactaaggataaaatagctccagcctgagcaacatggcgagaccccatctctacaaaaaaaaaaacacacaaaacaaaacaaaaaaaaacttatctaggcatggtggcgcatgcctgtagtcccagctactctggaggctgatgtgggaggattgcttgagcccgggaggttaaggctgcagtgatccatgatagtgccactgcacagtagcctaaatgtcagagcaagaccccatctcaaagaataaaataaaatagctgtcaacagacacattccacatgacaacttaaggagtcaaaattcactgaatgaagtgtagccgagcccaacagcattgctggcaaccctgatgactgaaggcactccagagtttataatctatcattatgatcatcggttagcttcctgcagtgcttactgattctgggattagatgtacttgagattgcctggattcaggataaacgggcacttgatctacatccgttggcaccttttgccagctttcatgccaggaatgccaggagaattctgcagattcacctgcagctgacagaggtcaggtctcaagcacccaaattcgcaaggccatttttgaaaacccagggaaagaacatctttaaccttccttgaatatccccctttgaaatttgagcaccccaaagcatagacttcctgatctggtttataaactgtttcagtgacagcattccaagttaaaagaaatctaagtttttaatgaggaagcatcttgaactgtcattcaaaagagtgacactccacctccttccagaaggggtttgaggcagtctatggtgaaagacacaaatacttcaggaccattaaagcaaggatcaggagacaggcgtggggtagcggaggactccaaaggcagataattgtgtctaaaacctggagtaaagagtgtggctgcaattgagcaagaaagcaaaatgttatcaatttcccggcaattacattgaatcagttctgagtgatcaatgagcagtattgatttgcacagccacttggctcatctctgatccatggcagaatcccatcgctgacaggaaaatcgagccaactcacgtttgcccccgaagcctgcccacgcatcctcgaaggagcactgagacctcaccacctgcgacagacacctggagccagtccgccacgcgcccaagttaagacaagccccaaacagcaccatcaaaagcctattccagagcccctattgaggggtgattttatccagagaggggctcaaatgtactcaccagtccatgggcaaagaggatggcggtgggcctcttggactcagtgtttctaagttggtgagaaggttaacttttcttacccccacccagcctagcccccccagggccacccctctcacctgatgcggcagatatccctctgctccgaggcactgctcaaatccaggggccctgggctgggtgtttgctctggcagccgcctggcgttcccatcatttatctcttcattttcctaagcgttgtcagcgtcagagaatcaattacccacaagtcaaccaaaggactgtttttagcatcatatcacactgacaaaccctgttggtgaaagaggtttggccccttgcagacttagactcctggtaaagtctccttttatctttggcacagtggacatagtacaaaggtgtaacattattccaagaggatatagagaatatatactgctataatagtgattggagaactcggctgggcgcggtggctcacacctgccatcctagcactttgggaggctgaggcgggtggattgcctgagctcagaagtttgagaccaacctgggcaacataatgagaccctgtctctagaaaaaaattaaaaattagctgggcatgttggcacatgggtatagtcccagctactcaggtggctgaggcaagagtgtcacctgagcctgggaggcggaggttgcagtgagccaagaccacgctatggcactccagcctgggtgacagagcacgactctatctcaaaatatatattttttaaaaaaagaaaaaatatgtgttaaaaataattggagaactcataacagtgaaacaccaagagtttattgattctccaagataaatgtgccttttcaaaagttcatataatttagctttgtccctgtgtaattttatttcacttttgggtagacaacattatgaataagcgttattctctccttagtggggaatttgttccctatctcccttgtcgtccaattatcagaattctgcactatttgatttacacctgcttggtcacaggctgatttcaacagctagcctgggggcatccgtcgtcacctgtcaaggcagccagacattggcagttgcctcagagaagtgtgaaatgagagggaagagatggaaaaccttgggagagttgttgtgtttccagatttctctagcctatagctaagaaatcctcaggaatgacataaaagcacaggaggcagaagctctggtttcccaggcggccgtcgtggaggtgtggaaagagctccaagcctcgagtctagggacctgctgcctctcccaagcctgtcaatcatgacctctgtgacccttaggaagttacttctacctggctgggtgcagtggctcacacctgtaatcccagcactttgggaggctgaggcgggtggatcatgaggtcaggggttcgagaccagcctgaccaacatggtgaaaccccgtctctactaaaaatacaaaaattagctgggtgtggtagtgggcacctgtaatcccagctactcaggaggctgaggcaggagaattgcttgaacccgggaggtggaggttgcagtgagccgagatcgtgccactgcactccagcctgggcgacagagcgagactctgtctcaaaaaaagaaaaaaaacttctaccctccgggcctcagtttctacctggaaacttgagagttgacatagaacagcaactttcaaactatttttttgagagggatcctatctttgccacccaggttggagtgcagtggcataatctcgactcattgcaacctccacctcccgggttcaaatgattctcctgccttagcctccagagtagctgggattacaggtgcgtaccaccacgcctggctaagttttgtattttagtagagatgggatttcaccatgttggccaggttggtctcaaacttctgacctcaggtgatccacgtgcttctgcctcccaaagcactgggatgacaggtgtgagccaccacacccagcccaaacattttttaaaaagtagcaaaactctttctttggaaacctacagagacaggtttttaatatggggctactctggttgaagagggggaagtggagacccccttgcctatccctgaggtacctcgatgggtcacaattacaagccagtaatttccaagagtccccttagcaacactattttgtggttctccttcttagcctgcactgagccatgttcttggcatctagcaaatatgagatgtttctcatagaagcaaggcttgagtggtatgtcaccttgctggccaggatacgaagtggtcaggtcaggccagatccccaaggattaagaatgggctgatagtggccaggtgcggtggctcatgcctgtaaccccagcactttgggaggccgaggcaggcggactgcctgagctcaggagttcgtgaccactctgggcaacatggtgaaaccccgtctctactaaaatacaaaaaaattagctgggtgtagtggcatgtgcctgtaatcccagctactggggaggctgaggcacaagaatagcttaagccccagaggcagaggttggtgtgagccgagatggcgccgctgcacttcagcttgaacaacagagtgagactctgtctcaaaaaaaaaaataaataaaaacagggcgtggtggttcacgtctgtaatcccagcaccttgggaggctgaggcgggcggctcacgaggtcaggagatcgagatcattctggctaacatggtgaaatcccgtctctattaaaaatacaaaaaattagccgggcgtggtggtgggtgcctgtggtcccagctactcgggaggctgaggcagaagaatggctcaggacccaggaggcggagcttgcagtgaaccaagatggtgccactgcactccagcctgggtgacagagtgagactccgtctcaaaaaaataaataaaataaataaataaataaaaataaaaataaaaataaatgggttgatagctttaaattaattattattattattattttatttacttaattttttggagacagggtctcgctcaggctagagtgtagtggtgagatctcagctcactgcagccttgacctcctaggctcaagcagtccccaacctcagcctcctgagtagctgggactgcagttgcacgccaccatgcccagctaattttgtttatttttagtagagatgagatctcactatgttgtcctggccagaactcaaatattatttaaaaaaaaaaagtgcaggtcacagcagcagggagcagacgaagcagttgggagccccagggctatgggctctcgcacagtcaggaagtgtggggtaactcctggaaatgcaaagtggggaccatgcagagctgggcacccagagtggacgctggtccagggcacagatgcaggttacatggagttggccggagaagccatggggctcagaatccagcctcggttgaaactctgtgccaggcattgtgctacagacttcacgccctatctcagttttcttatttgtaaaatgggagtgatagagctcaacttatgaggctcttgggtgagaattattgtgacattgcataaagggcagacctggcatagggcagagctcacaatttagctttgataattgctgttcttgtcattgcggtaaatgaggaaacaggcatgaaaggttacgtgctcagccacagccacagagctagtcagtagctggaagagctatgactcaaacatgttttctgacttccttacagccccagctactcaggaggctgaggcaggaggatcacttgagcccaggagttagaggctgcagtgagctatgttcgtgcttccgtactccagcctgggcaatggagtgacaccttgtctctattgaaaaaaaaaggaaaaaaaagttttctgatttccaatttgtttgccccacactaaggcccttcctgggcctaccagttctaatttttttttttttttttttaaaaagaacttcaacagtttggccgggcgtggtggcttacacctgtaatctcagcactttgggaggccgaggcaggcggattgcctgaggtcaggagttcgagaccaatctggccaacatggtgagaccctgtctctactaaaaatacaaaaaaattaggcgggcgtggtggcatgcgcctgtaatcccagctactcgggaggctgaggcaggggaattgcttgaaccagggaggtggaggttgcagggagccaagatcgcgccactgtgctccatcttgggcgacagagggagactccatctaaaaaacaaataaacaaacaaaaaagagttaacatatcataaagctcactggttttaagtctatggctccatgagctttcatacatttatacggtggtgccaccattgccacaatcctgttttggaatgcttctgtccctccaaaaattccctctagcccatttgctctcagtctccactcttgccccctgccctaggcaacccctaatctgctgtcttacagtttttcctttgctaggaaattcctataaatggaatcttttatatgatgagtaaatcataataaatcaaataaaatacgcactttttggtgtcaggcttctttcactcagcataatgtttgaccttcatccatgttgatccaggtattaatagtttgttcctttttattccattgtatggatgtatgactgtttgtttacccattcaccttgatggacatttgggttgattccagtttggggctagtatgaattatgctgctacgaactttttttttttttgagacagggtcttgctgtcacataggctggagtgcagtggcacaatctcagctcgctgcagctttgacttcctgtgctcaagtgatcctcccacctcagcctcctgagtagctgggaccacaggcgtgatccgctgcgcccagctaattaaaaaaaatttttttgtagcaatggggtctctctatattgcccagggtctctctctatcaaactcttgggttcaagtgatcctcccacctcggcctcccaaagtgttgagattacaggtgtgagtcaccctgcctgaactgctatgaatatttcagtaggagaccttgtgtgaacatgttttcattaatcttgggtgggtacctaggaggggaatcactgggtcatataatgagggtttagctttttaagaaactgccagtcttttccacaatggctgtaccattgactttccccccagcagcgatgggggtctgcccccgaatttcttaaatgagcatttatttcctcatcccacaaacccctcttaagcaactaattaggcccacgtagagcttgctggattagctgtccatctccgaggggcttagtcccttttctgcagttaggggagtggggtggctctctcccctctgcatagcatcttctgggtgctatgaggaacgcagagtgtttggacacagtgcttgtcttcaaagagctacaggaggaagctgagtcattaccctgggcaggtagatccagagagggacacagtatcagtataaatgcagagagggacacagtatcagtataaatgttccaagaatcgagagaagggagaagtcatgtaaacccaggagttcatcgtcagacaggagtagggagaagcttaaaatgggagcaaatggatttggatttgaaaccaactctgccatttgccccatgtgagattctaggcaaggtcaatcccttaatctctctgagcctcagttactacatctgtacaatggaggtgataagaactaccactccaggttgttgtgagaaccagaaatatgcttggccggatgcggtggctcacacctgtaatcccaacacttggaggcagaggcaggcaggttgcttgagcccaggagttcgagaccagcttgggcaacacagtgagacccccgtctccacaaaaagaaagaaagaaaaagaaatatgcatgttggtgtctgatatgtaagtgtcttggcaaatggtagcagttattgtagtttttcagagctgagctctgaaaaaacgggctgcttggtggcagcctggtggcggggagggctgggagccatcttggtgacaggctttatttgcagtaaattctcaaacccactgagaaagagcatagtggggcggggggtgggggaggatggggagccagaaagaacccggagaatgaaaacccagccccttccaccgattcccaccgccgccttgtccttgtcctctgagtgatgatgagaacgcctcggtggccgcccagctcactttcccaggacgtgttttaacccagcgttaattagtgattgtggctgcatctagggctgggggcttgagctgaagaaagaaagtaccccagagaaaggcagactttaaaaggccccaaaaggctggggcagtgaggctctgtggagagggagacaagccgtgcatttgtgttgcaaatttccagtgtgtgcaagccagccattcaatgagggcgatgctactggcagccggcatgggggtggggagggaaaggaagtccacaaagggggcctgtctgaggacctcagaccctgctttgtaaaagctgctttcatccccctccctggttgatggcagtgttcccagtccaaggccactgtgcaaggatccagaggcctggaccccagactcccagattctcttgaccctccccacttgcccttctaggcctgtttttgtggcatcagcagcagcaggtgtctgagtgctccagggtactgtgtcagaggagaccaggtttaagtggtgtgggcttgctaggtggcttcaggcaaagtcacttaacctccctgagtgtcagtttcctcttctgtaaaatggagatgatgtggtcctttcccctgcttcacagggtcctacccaaacagaagggcctgtgattggatggcagctcagagcttcatttctttctcaaaaagtctgcatctgggaaagtcattagaagagctcttttaatgaagagatgaggttgattgtacttagcaaatcaatgaagcaactctgggttccttggaaatgttactcccacgagtattttaattttttttttcttttgagatggagtttagctcttgttgcccaggctggagtgcaatggcatgatctcagctcacagcaacctccacctcccgagttcaagcgattctcctgcctcagcctccccagtagctgggattgcaggcgtgcaccaccatgccagactaattttgtgtttttagtagagatgggatttcaccatgttggccaggctggtctcgaactcccaacctcaggtgatccacccacctcagcctcccaaagtgctgggattacaggcgtgagccaccgcacccggcactaattttttttttttttaagacagtctcgttctgtcacccaggctggagtgcagtggcgcgatctctgcccactgtaacctccgccttccaggttcaagcaattatcctgcctcagcctcccaagtagctgagactatgggcacaagccaccatgcccagctaatttttgtatttttagtagagacagggtttcaccatgttggccaggctggtcttgaactcctgacctcaagtgatttgcctgcctcggcctcccaaagcgctgggattacaggcgtgagccactgcacctggcccatgagtattttaaacattcaccttgcttggaatctttgggcctgccacaagtcaattaggcacactaaccaggttgttttttgagttggtagacttggtgcaggtgccacgcctgctgcataggaggctgtccccagctgatcctcgggtaacctttccctggtgaagatatgaccatacttcaaaagcccccttggaggccatctcttcaagaagcatcctccctccctggccttgcctgtggttgagtgattttataattttatatgcagaaaattgtctcctttcctgagacccttgggatgcctgggaccaaatctttgagccctctaaagctttctaatcaaagtgtggtccatagaccagcagtattgacagcacctgggggcttgttaggaatgcagaatgtcaggctccactctggaccaattgaatcaaaggctaaaatctgtgaggattctaaaggcattaggcaccctggtgtctaaatgcccgggattctgatcaggtaggagggccatggcctcagacagccgggagatgtcgctgttccccagtcattggagttgtcaggttttgctaccaaatgccagaggccccgcctgtggggctttgttcgctgtgaaatcccaggactacgaaagggtcaggtcaagtttgtcatgccaccttttcatcggccactcaacctgcgcctcctcccatctttccctgaccgttgctgccctgggttctcagctatgtttccagatagggaagactgtgtgatccccaagcccagccctgccccaagcccagccctgccccaggatctcaggagaaagcccacaggagaaagggcatctggccaggcgcaatggctcatgcctataataccagcactttgggaggttgaggtgggtggatcacttgaggccaggagttcaagaccgacctcggcgacatggtgaaaccccatctctacgaaaaatacaaaaattagctgagcttggtggcatgcgcctgtaatcccagctacgtgggaggctaaagcagaagaatcacttgaacttgggaggcggagtttgcagtaagccgagatcatgccactgcactccagttaggacaacagagcaagactctgtctcaaaaaaaaaaaaaaaaggaagtgcatcctacagagtctccctcagcctggctcatcaggcaagaagagctcagaccagcaaggagggggtgtctacagggaggaccgccctcgcttggaatctctgagttgggggatcttagtgacaacaggacctgcagacacagtgagaagaattcccatgatttgagtgtccacaggcaaaagtcaaggcctgcttgggacttcagcttccagtttctacttcccatgtcagagccaggttatctcacggtcttacttcccctctgtggttacagtgcagttaaaggaaccctaatagcctcgactgcagcaaactcaggtttgagtcagggccaaacggccctcactccagactagaagcagagtcattggggtttccctctagggtctggagctcccactctctgggcctttcccaccctgcctggtttagtccctgaacacccaggccacagagcagaaggaagagcagcctccacacccaggcccccagctcctgactccccagtggctgggccctgttgaagctggaacctcttctaaggcccagaacctggaatccatggctgagtgagacctggctccctgcctagctcctgtccccctggggtcagccccagtcaccaccacccaatgactcacggagtctagctgtcctggatttccgcagtctagcagtaacatctacatgccagtcacgtaacatacgtgatctcatctcattcaacaaccttgagccttaggaacacatagtgctctcatttcatggtggaagaagctgagtcttggagatattgggtaactcgtccaatctcatacagacggtacatggagaggccggggttaggagtggggcttgcctgcctccagacaagctcgcctgccccggaacagtgctatccctgaccctgcctcagcagcccagggctaatttctgccagcttgatttcccatggattggtatcagcagggtccatgtgggtcctgcgaggtggagtgataaaggtgacaagtgaggacactgcaatggaagatggcactgcactttacatttgcacttgtcatggtgatagtgacatttctgattaacatcagaactttggtctgctgatttcacccgtgaacttggagccagaagtcccaggatccatctgatctctgacccaattgccacgtccttcaggtgagagatggtcccaggcatgcacaaacattccaggatattaattgatgatgaaaagtcatcattaatttattggcatattttgtcttttattcctgcctccttccatcctttgataatttatccatcagatatcgatgtaataatacccatcaggtgctaagtgctgtgtttggtgtccaggagccaaggaagtgtaaagcacaattcaaatgaactgatatttatcaagtgccgctatgtgccattcaccgagttgggggctccaggcattctgtggacttgctttggtgcaattttcatcctagctagacaagtgggcaaacagataattacacagtgtgatatacacagtctataatcgaggtgcatacaaggagctgtgggagcagagtgggtgtggccttcaccctgctaaggagcaggaaaggctttgcctaggatgtaacttttttttgggaggggggcacaagctctcactctgtcgcacagactggagtgcagtggcacgatcttggctcactgcaagctccgcctcccgggctcaagcgattctcctgcctcagcctccggagtagtggattacaggtgcgcgtcactaccgcccggctaatttttgtatttttagcagagatggggtttcaccatgttggccaggctggtcttgaatgcctgacctcaaataatccacccccctcagcctcccaaagtgttgggattacaggtgtgagccacctcgtctggctccttttttttggaaacaaggtctcactctgtcacccaggctggagtgcagtggcatgatctgggctcactgcaacctctgcctcctgggcttgggtgattcccccacctcagcctcctgagtagctggggctacaggcacgtgccaccatgccaggctacttttgtattttttgcagaaacggggttcctccatgttgcccaggctggtctagaacctgtggggtcaagcaatccacctgcctcagccacccaaagtgccgggattatagacgtgagtcactgtgcccggccaggatgtgacttttaagctggatcttgaagaaagaggaaaaattaatccagcctgagcaaaggcttggaggcctggttagtgaacaacaaattatttggtgtggctggagtgagggtcctcacatctttctgggcttcggacctggaccccagattcagttgtccagggtagggcccagggttctgaatttttaactagggcctcaagtgattctggtacaggtgcgaggtcccacagactgggaaactcgggcctgtggcttcagcggcaagaaatgtggatgaatctggaacaatgcattagggccaagctgtgcagggtgttaaatgccatgctaaggaatttggacctgtcttgttctcaatggagagagtccattggaggctttcaagccctggagtggtggttttggaaggaaaatgttgccagcagcctggtgggaggaacagagacccgagaggctagagagaagaagcccagtgaggaagctttcacagctgtccaggccagccatcctggaggcctgagctgggggtttgggggggcggtgggcaaggagcatgggagtgggggcgctggatttgagagggctctgaaaaatggggcgcaggcctgcagtagatggatgaggaaggtgaaggagaggttgttgagaatgggctggggggcctcaagggctgatcaggatgcaccagggcagtgggttgaggggaggaacaatagagccaatttgcatgagttgagtttttcactcatgtgacctccaggaggatgtgggtaacaggtattggatcttgtccgaagcttggagaaggtggttgaagttgaggggagagcttttttttttttttttttttttttttttttgagagggagttttgctcttgttgcccaggctgaagtgcaatggtgcaatcttggctcaccgcaacctctgcctcctgggatcaagcgattctcctgcctcagcctcccaagtagctgggattacaggcatgcgccaccatacctggctaattttgtatttttagtagagacagggtttctccatgttggtcagactggtctcaaactcccaacctcaggtgatctgccagcctcggcctcccagaatgctgggattacaggcataagccaccacgtctggctgagactttgaagagcaaagaggtattagaagactgtagactgcttacgaatcttcagggcacgtggaggcagaattagaaaaagaggccaggtgtgctgggccacacctgtaagcccagcactttgggtggccaaggtgggattgcttgaggccaggagtttgagaccaacctgggcaacaaagcaagacacccactccccatgtcaaaagcagaagcgaagagaaggggaggggaggggagaggaggggaggggaggggagggaaaggagaaggaaagaggcaagaagaacacactagaaaagtagctgtttggttgttttttaatttattatctccactttgcagatggggaaactgggactcagacaattaaataacttgtccatggccactatgcttagcagggtaaggctggagttttgaacctaagtctctttggctccagtgcccatactctcttggctgagtctcccaaaggcaaatcctgtccccagacacaaaataaacagattcaaagattgggggtgaatgggtggaggtgaggaagatgcagcaaaaagaacttgcaggaggccaggcgcggtggctcacgcctgcaatcccagcactttgggaggctgagacaggtggatctcctgaggtcaggagtttgagaccagcctggccaaagtagtgaaaccccatctctactaaaaatacaaaaattacccgggtgtggtggcaggcacctataatcccaggtactcgggaggctgaggccggagaatcacctgaatccgggaggcaggttgcagtgagctgagatcatgtcattgcactccagcctgggggacagagcgatactccatctaaaaaaacaaaaaaagaataacttgcaggacagaggcaggggagaccagcatattaagtgagcctatttttcattccttctcccactagaatatattgaagaaaaccacagacttcatattatttcatcgataaatatttcagtatgtatctcagaaagataaggctcttttttagacatagtcacaatcccattatcacactttaaaaaaaaaatctaacaataattcctattaaggaaacctatcgaggacaatctgacaagacctcagaatggaagtgggcttgtatatcttgagccagcactgtcacaaagccatgataaggaatttaaattttcccaagataattacagccaaggcgaacagggggttggaaatgcaggagatttgagaagcttgtctggctctggaaaggaaatgttataaaggaagaaaaaaaagactggaaaggtttacagagtacaaaagacaagactcttctttctttctgacttcccctttcctcatgcgagggtctttagtcataaatgagaaataggaacccgggctagagtgaaaccaaatggataaaaataacacaacaaatacagtattgctaaatgcaatgagatagaggcatggggtttatttcccacaaggctgtgcaaactgctcacttcttagataaaggctcttcagttgctgctattcagaatcccagcttcctgagaggtcatgtccattgattattaactggttattgtggacactgaccttctactaggcatcaagaaatcagatttctagaccaggtgcagtggcttacatctgtaatcccagcactttggggggccgacgcaggtggatcacttgaggtcagaagtttgagactcagactggtgaaaccccgtctctactaaaaatacaaaaattagccggtggctcatgcctttaatcccagcactttgggaggccgaggcaggcggatcacctgaggtcaagagtttgagaccagcctggccaacatggcgaaaccccgtatctactacaagtacaaaaattagcagggcgtggtggcgtgcgcctgtaatcccagctactcaggaggctgaggcaggagaatagcttgaacctgggaggtggaggctgcagtaagccgagatcgtgccactgtactccagcctgggtgacaagagcaagactccatttcaaaagaaaaaaaaaataaattagccaggtgtggtctctactaaaaatacaaaaattagccaggcatgttggcaagcactgtaatcccagctacttgggggaccaaggcacgagaattgcttgagccgtggaggtggagtttgcattgagctgagatcgtgccactgcactccagcctgggcaacaaagtgagactttttcttaaaaaaaaaaatatatatattggtccagctcctccatgaaattgctctgtgaccttgggcaaattccttgacttacctgagctgtctgtaaagtgagggtattagaccataagacctcatcatttcctttaagagtcgagttctctgattcagtgaatacctagtgaaacagtgcttacttcctggggtttagaaagcgttactaggatttggctcaatgttacactgcatctgcaaaatgcttggataggccgggagcggtggctcgtgccctgcaatcccagcactttgggaggccgaggcgggtggatcacttgagatcaggagttcaagaccaacctggccaacatggcaaaacctcgtctctactaaaaatacaaaaattagcagggtgtggtggcgcgtgcctgtaatcccagctactagggaggctgaggcaggagaatcgcttgaacccaggaggcagaggttgcagtgagccgagatcacaccactacactccagcctgggcaacaggtgagactctgtcttaaaacaaacaaacaaaaaaaagaatacttggctaacctcggtgaaggatgccatgtgttgatgatgcaggttcatgctacaaaatcacccagcgttgctcttggctgacgccccagaggaaatctgaaacgcagcactacgtgagctctctggaaatggatggtagacggagagcacgtggaaactgcacagagccgtccacagatggagccagctgcctgaggctcaggaagcaaattgaagaaataagttgaaacaacagcccaatgtgtttttttttgttgttttgtttcattttaatggcaggtaaaggggttgacggatggggaccagggatgtggggctgagatggagctaaaggggagggggctgtgaaagccggcaggtccagttgccatatgttgctgggattctgggaccttgacctggggaactgcatttgagcagagtctgaagaacttgagattggaggggagccagaggaagttgcagaagaacttgaacccgaaagggcagaggaaaaacaaaacagaccccatcctgggccagaagagaagccctttcctgacaccttgccctctgtccggctcatcatcacgtgaggaaggaggggctgtgtggctcttggctccagctgctctgatttcttttttcagttcctccaaggtgctctgttctttcttgctgcatggcctctgctgtgtcctctccctggaaggcagctctttcccccgatcaacttccactcagaccttagcttaaatgtgttgcctccaggaagccctccttggccttctgataagacaaaccactccattttaagttcttacgtcattagtcacttttaaaaaatagtgctcctcactgttatcattcttaatgtatttatgtgattttatcattctttaatgtatttaatgaatttatgtgtattatgtgatttacatgtttctaaaaaaatgtctaattttgaaacaacattgagcttttagaaaagttgcaagaataatacaaaaacctctataggccaggtgcggtggctcacgcctgtaatcccagcactttgggaagcccgggtgggtggatcgcttgagcccaggagttcaagaccagcctgggcaacatagcgagacctcatctttacaaaaaacaaagcaagcaaattagctggctgtgatggcacgagcctgtagtcccagctacttgatggttaaggtgggaggactgcttgacctaggagttcaaggctgcagtgagctatgactgccgcagcattccagcctgcacaacacagcgagaccctggttctaaaaaaataatatttcaaaaattaaataatttaaattaaatgaattttatttatttatttatggagatacagtctcactccgacacccaggctggggtgcagtggcacaatctcggctttgcagcctcaacttccagggttcaggtgcttctcccacctcagtctcctgagtggctggaactccaggcatgcaccaccatacccggttaattttatatatatatatatatttttttttttttgagatggagtctcgctctgttgcccaggctggagtgcagtggcgtgatctcggctgactgcaagctctgcctcccgtgttcactccattctcctgcctcagcctcctgagtagctgggactacaagcatccgccaccatgcccggctaattttttgtatttttagtagagacggggtttcaccgttttagccaggatggtctcaatctcctgacctcgtgatcctcccgcttcggcctcccaaagtgctgggattacagacatgagccaccgcgcctagcaattttttgcatattttttgtagagaaggagtttcaccatgtggcccaagctagtctcgaacttctgggctccagcaatccacctgccttggcttcccaaagtgctgggattacaggtgtgagcaatcgtgcctggcttaaattatctttaacttaattaaattaaattttatttaatttttaaaattaaataaaaataaaaagaactcctggctgggtgcggtggctcactcttctaagcccagcactttggggggccaaggtgggtagatcacttgagcccaggagttcaagaccagcctggccaacatggtaaaaccccatctctacaaaaaagtacaaaaaattaactaggcatggtggtgcacacctgtagtcccagagacttgagatgctgaggcgggagggtctcttgagcccaggaggtggaggttgcagtgagccgagattgcaccactgcactccagcctggtcgacagagtgaaactctgtctcaaaaaaaaaaaaaacacaaaaaattgtaaaaactcccagactcaacaattgttaacattttgtcacatttcctttgtgattctctctccctgtctctttatatgtatacgtatagattatatgtaatcatacctatatacatataatatatgattgttttttctgaacctcttaagcataatttgcagatatcttgcccctttacccctaaataagatcttcacttacacagccacagttgtataaatgatctgattaatggaataacatctgttttgacttaaatgtaggttccatgagggtgcggcggtatcttgctttttcacccacgtatgtgtcacctagcatagtgcctggtgcatagctgggactcgaaatatttgttgaacgtacaagaattcctgaattccaagggcttgccattaatatggtgttcttgccccgcggccagctttctcactcagcctgctgcacgtgttggatggggctgggtgttgagacttgtcccgcccatctctcggtggggaatcaggatcccatcaaggtaaatcagtgcctgaagatgtggctttggcttctgtcatttctgttaaatcctctccagccagctctgacccttgccgagctacattccttttttttttttttttttttttttgagatggagtttcgctcttgtcccccaggctggagtacagtggcgtgatcttgggtcactgcaacctctgcctcctgggtttaagtgattctcctgcctcagcctcctgagtagctggaattacaggcatgcaccaccacccccagctaatttttgcatttttagtagtgatagggtttcatcgtgttggccaggctggtcaagaactcctgacctcaagtgatctgcctgccccagcctcccgaagtgctaggattacaggcgtgagccaccgtgcctggcccggaactacatccttgactggcagccacctctcctctggctcggtggcacctgttggccatcacacccagttaactggccccatgagagagttctggcaaaggcagctgaaaggctggccaatcttcccaggcagttgcctttgtgaggcactggcctcagccttggaaactgccctctgtccccttggcccaccaggtgctttggcctaccttaccgcccacgttgtgctctcctgttaggatgtcgtagctcttagtttacatagggggccagtggagggcatgatgtcctcagggcaagtaagagctggggcccacagcccacagaatcctgagttggacaggcttttagagatcagataggacagtggttttccaaatgtggtccccagtcagcaccatctgcacctcccgggcacttggtagacgtaccccaccccagctctattgaatcaggaactgattagggtagggcacaaccatctatgttttaatcagcccttcaggaggttcagatgcgtgctcaggtttgcaaccttttgctttaggccaaccctggcagttttcagggcgggggtggggggttcacgcggctcctgcctctcacatagcacattctttgctcgctgttgcccatctgcagctactggctttttaaaacaatgttttcagaataaaaaataagcttatcacggagttattacattaccatggcaacctggcacctgactagacagaagcaggtagcacaactgccttggggtctcagtggcactaaagtaatcgtggatttttgctctgtgggctgttctgcgtatgaacagcttctttgtttctcttgtcttttcccccttttttctcctgttttcggtttggacccttattcctctctcacctcattaggagcaaagaataattgttttagattttccaagaggctgccacatctgacctctcctttgaaactaacaataaccccaagaggtagctgatatgagcagggctattttgctgcgttttttttgttcatttgtttgtttgtttttagatggaattttgttcttgttgcccaggctggactgcaatggcgccgtctcggctcactgcaacctccgcttcccgggttcaagcgcttctcctgcctcagcctctcgagtagctgggattacaggcatgcgccaccatgcccagctaattttgcgtttttagaagagtctcaccatgttggtcaggctagtctcgaactcctgacctcaggtgatccaccctctttggcatcccaaagtgctgggattacaggtgtgagccacctcgccaggacctgactgcatttttatcatcatcgaagtgttgtattaaaattttcttgaattgattgttttgagaaggaacacgcacagaaggcaaaattcaaaaggtacaaaatggtgcatgttcagagtgagtctctgaatgactctgtgtccaggtctcctccctgggccggggtggggggcggggtcccgtgatctgtttcttgtgcttccttaccgacttgctgagacagcctacacatataaaaggtttttttttaaacctttcacctttgttatttacacatatggcaggttccatccccactgctcagtaccttgcttccttcacgcagtctgtcttagggatccttctccagcgtttagagttgccttatgctttttattttttaatttaattttttaaaaatttgagacagactctcactctgttgtccaggctggagtgcagtggtgtgatcttggctcacagcaaactctgcctcctaggttcaagtgattctcatgcctcagcctcctgagtagctgggatcacaggtgagcactaattttgtatttttagtagagatggggtttcaccatgttggccaggctggtctcgaactcccaacatcaagtgatctgctcaccttgggcagatcccaaagtgttgggattataggcgtgagccaccacacccagccgccttatggtttttaagagtctgttccatagtgtagatgtatcaccatttaagcagtcccctgttgataaatatttgggttgctcctagtcttctgctattttcatcctcatttaacagctagaaaagttgtgattcagagagggacatgacctgtgaaagttcccaaagcaaacgttggcatcttcaggcattgcttagctacagaatataagaaaaaaggaagagatgactgacccctgaattagagaaaacacagagccatccagcgacctgatttcctcttctgccacactagtgtcttaactagttcagttaaattcttctaacgttgcctgatatggaattaaataatcatttatggaagtattttaaatctgtcttccttgctagacagtaacctttgttagggcagggactatgttttcctcactccttcatccctagcaaggactatactcctagaaagtactaagtatatagcaggtgctcaataaatacctgttaaatgaatgaatgaatggatcaggattgtgcgtggttaagacagtgggcttagagatcttgctttgaatcctgggtttaacagttattactatgtaatcctagacccatcattcagcttctcaatacctccatttccttaggtgtgacatggaaacgctcccttgggattgctggatcaggtgagcaaacgcaggtcaggtatccatcacagggtctgtgtgcagtgaggcctcagccatttttcctaagccagagcttcttccaacatcatatgctgcctggaaattctgatgaaggaaccgaagaatcttcaaggcggaggtaatttgagctgggccctgaaggaggagtaagattccagcttatgtggccagggccagatttctttcctgagttcatccaactacaaaatggagatgatgacacccagtttctgtctccctctgggagcgctggtctggcttaaagtctctcaagaggaaaaacatcatacaattaaaaggcaccatcgttattcaactggaaaagtgccttcccgggacaagtgattctgcttgtgctgtgtatgattggatatttagtgtgaatttaacccagggtgtcaactgtgctgtcagttagagctaagtgtaatggggcacttagtaaatgtggaggtaattaaagccatccagatgctggatgtgggtgagctttgtgctgcctctgggactgaaatgctttagagagatgaagttctggagtctctttttggggtgcactgggagtgtaagtcccggcgttggcctttgctgctgctgtacccttctgctggagactgaaagccacctattctgggaagccttccctgatcaccaagacagaatctgatgttctgggttttcctggcaccgcacacacttctcacaatatcctattatcttagtttgtttctatgcccatctcccccaactggagtccaagatattgtccctaggatttttctgacatacagttagtgctcaataagtgtctgctgaatgaagcttttcaggtttcacaaccatgggaaatcttgggtctcaagaacagatcaaggtgtttgattttcctgggaagggtagaccctgtgtagttctggcaagtgatccctcttctgatggaaattctgtttgatgccctccctagtgaggccagggtggcaacgtgagcctatcctcctttgcagcagacctgagccctgtagatttacagatatctgagtgtggaatccagccctgagtccacaccttgtagaaagcaggaggagagcaggccttgaacaactgaagttgcttatctgctatgagcctcctggaggcccaaataaagaatccagaatgtggcgagtctccactgctgcctgggccctgttgcctctaagatgaacttatcgctgacctttctggcacatggagaatgtccccactgcccggagaagagaggcctctccttgtggtcctgcattctggactcagtgggatccaccgcactcagcattcttggcttcatgctggagctgagcgtaaggtgagaaggagttgctgggaacactgtgatacctggctcaggcaggaaccacccaagtcaggcatgatcagatcttggactgacagccacctgctctgaacaaggccctggactctggacttaccactgtctctgaccaacccttccagctggcctttctacctccagattcggagtctggagtcaggcttctggctggtcatggttaggtccagtgtccatgctccagcaggaattgaggggagcgtgtccctcccattcgtctgccattatctccctgcttcttgggattcccacaaatggggtctcagatgctgggcagcccaagtgacaaatactagctgggttcccattctatgaacttgatattctctctcggagggctccatctcctgggcccatctctgccccatgtggtgtctgctgaggtgcctgggtctagagaatccacttccaagatagtttctttgttcaaaaaatgtttttttttatttttttatttttatttgagatggagtcttgctctgtcacccaggctggagtgcagtggcgcaatattggtttactgcaaactccgactccctagttcaaacagttctcctgtttcagcctcctgagtagctgggattacaggcacatgccaccatacccagctaatttttgtattttagtagagacggggtttcaccatgttggccaggctggtcttgaactcctgaccttgtgatctgcctgccttggctttccaaagtgctgggattacaggcgtgagccactgtgcctggcccaaaattttaaaacgaaaaattaaaacatacaaaaaagccaaaagaattgttcaaaaaatgctatacccatcatctattaggttggaacaaaagtaattgcggtttttgccattccttaacctaacagattctatgcttaactttcattctgccacatttactttaacacacatgcatccatctctccaccgctctgaggtagcttcttcactcttgggtctgatgcctgatgctccctgcactctttctccctatgtggcctgagcttctcacagctcggtggtctcgggatagttgttctttctgcatggtggctgatttccaggccagttcaacaccatgcttgaaactgacacagcatctcttccacaattgtctattgctcaaagcagtcactgggtagaagagcatgtgggatggggaataccagccacttaggataaacagtcagctgcaaagggtggtcagtggagccttgaaaaggtgatattggggctcggtgcggtggcttatgcctgtaattccagaactttgcgaggccaaggcaggtggatcgcttgagctcaggagttagagaccagcctagctaacgtgacaaaaccccatctctaccaaaaatatgaaaattagctgggtgtggtggcacatgcctgtggtgccagctactcaggaggctgaggtggaaggattgcttgagctggggaggtgaaggttgcagtgagctgagatcatgccactgcactccagcctgggagacagaatgagaccttgtctcaaaaaaaaccaaaaaccaaaaaacaaaaacaaaaaaaaaaaaaaaagagagaaagaaagaaagaaggaagggagggagggagggaggcaggatgggtggtattggggctgagccctatggaaagagaatgaacctgtcttgtggagagccagaagacagcattctagacagagagaccgacaaaggcaatggtttgaaggtggaaaagcaaatgtcgtacctctactttcccttttccacatccaaatccagcccatcattcgggacccacattgagctgcctccctcacgaggccttcctagatacttcggcgcgtgctgatcctgcccctcttcctagagctttcatgtgtgtacactcatctgacatgcacaggtcagctgggtagtgcaaaggttatgcatgcagactctgcgaggccttagggaagctgcttaacttttccagccttaggtttcttcacctgtaatgcctactttatagggtgctgggggagaatattgatacgtgtaaagtgcttggcacctttacacatatgaatatgcaataaacagcagctacaattaatacaaaactggctcactcagtcaagtgtgactccaagaaaatatttttcagagaagaggctacggcttttttggctttttcttcttcattgtgcaatcactgtgccttgcatagatattaggcatagaaataagcctgccacaaagctctcctccgtgctgtggtgctcatggagccatgcagggcacagagacagcaaaactcagctggaggcctctaagagcttctagagagtgagcaagtagctgtgcctgtcattgtgcctgcagcagtcacttgggcgatcttttacatttggatacagagagtaacaggtttcaaagcacctgcacacctggattagtatgctggggctgctctaacaaaggaccacaaactgaatggtttaaacaacagatatttactttttcccagttctagggactaggaatctgaaatcaaagcgtcagtggcaccttctgagggctgtgaggagcctgtcccatgcctcttgactagcttctggtggcctgctggcaatctgtggtgttccttggctgtagaggcatcgtcccgatatctgccttcatcttcacatgacgttctctctatgtgtgcatctgtgtccatgttccccctcatttaaaataaactatttccttttttagagacagggtcttgctctaccacccaggctggagtgcagaggtgcgatcataactcacttcagcctccaactcctgagctcaagcgatcctctcatctcagcctcctaaagtgctgggactacaggcaagagccatcgcgccctgtcaaaatttcccctttttataagtacagcagtcatactggattagggactaccctaacactctcattttaacttgattacctttgtaaagctcctatctccaaataagatcccattgtgaggtactgggggttacggctcaaacacagctttttggagggacacaattcaacccagaaaacactctcctcactcacaccctgcagtgtgtctctccagggcaagtagtaagtcctgtcctaaacatctgcaccctgcaggcctcagtgtcaccccctcagctattcttaggctccaagccgtttctcactacccagcctttccaccacccatcgtgctttttcctccttctctttgcctggcaaagtcctcctcattcttcatttctttttttgagatggagtattgctttgttgcccaggctggaatgcagtggtgcgacctcggctcactgcaacctctgcctcctaggttcaagcaattgtcctgcctcagcctctcaagtagctgagactacaggtgcacaccaccatgcctggctaattttttgggtattttttgtagagacggggtttcgccatgttgcccaggctgatctcaaactcctgggctcaagcaatctgtccaccttagcttcccaaagtgctgggattatagacgtgagccaccactcttcatttcttaccagaaatgtgatctcatggacgtcttccctcatcacctctcttttgattgtatctcccatgttattgcttctctcatggctcccccttcttccttcccaacacatctcatggtttttaagtgtacatttatctgtgtgattgattagtgggggtgacagacattgacccctagtctataagcacagtcagggtaggatcccacctactcaccattgtcttcccagtttcatagtgcatgatccagagtagaaactccataaatattttttaaatgaataaattatgcattttgggtcccccatgccacctcacatagtatgggattagtgaatgttgagtgtattatttgtcttctaagagactgaattcctttagggcaagataggtctctctctctctcttttttttttttggagtctctggtatctaacctctgttccttgatcctctatgtatgttatctaggctgcataaccaattatcctaaaacttaggagcttaaaacaataacatttagtatttcacaatttctgtgaggcaggcattcaagtggcattgcaaggtatttctggctcaaggttgctcttgagtttacactgaagattttggccaggccacagtcatttgaaagcttgactaggactgctggagccacttggctcatacacatggctggcaagttggagctggttgttggcaggcagctcagttactccccatgcgagcctctccataggactgcttgagtgtcttcacaacatggattccccatgagcaatcaagacagaggaaagaggaagttgcaatgtcttttatgactttatcttggaactcgtgctccaagatttccgcaatatcctatgggttatacaggtcagtcttattcttggtgggaggtgactacagaggggtatggatatcaggagccaagaatcgtcagggtttatggtggaggctggttatcacactctcatctaggtttctttttctcctactacttgccccccaccccttcttaatcatggaacactgttctttgccttcaaaaaacttatcctgttatatgattacacattcatttaattagtctgtctccctccaacggactgtaagcaccacaagggcagagactgtatgtgtctgctttagcactgtgtcctcagttacaaggacaaagcatagagtacgcgctcagtgaatgctttttgaatgaattataatgatttgcttctgtctgaattacaagaggtgtttctgtttgtctcctctctgcattgtaggctcctagctcaggacctggcataaaattaaggaaatgaacgtgagaaacacttttgaaatagtgacaacacatccagatgaacattttgcaggacagctacacacccgttttagctcaccagctaccagttgtgactgtgctctgctctgggagatggcttagctttgcataggacaaaattctaatctagtttcgcgcagttcttacgaatttgttacaatgagacgggccaagctatacagcccattgcgatgaataagtaacttttttttttttttttttttttttttgaggaagagtctcattctgtcgcccaggctggagtgcagtggcgcgatctcggctcactgcaacttctgcctcccgggattcaagagattctcttgcctcagcctcccaagcagctgggattacaggcgcccgccaccacgcccggctaatttttgtatttttggtagagacggggtttcaccatgttgaccaggctggtctcgaactcctgacctcaagtgatccgtccgcctcggcctcccaaagtgctgggattacaggcgtgagccaccgtgcccagccccgagaagtaatttcttttgttttctttttaattaaacaaaaatgttgctgaaacgagctgagtgatataggagcttaaagaattgacaagctctagatttcatttccccaaacctctttgtccagctcgaacccacagaacagggacaaaagtcgacaaaacccagcggtgcctcacccagaaacctggcaacgcgggcggaacagagccggttggttgctcagtgcgcgtcacttccgggactcagggtcgcagggaactacttccgggggagcggcgcggcggcgcgggaggtgagtgccgcagctttgcggtggggtgggaaccgagagagagccgtcctcggtgcggtggcctggctttcccggccggcctgtctccagcggcgccgcttggtgggcccggctgtcgctccgctcagggcctgaatacgttccctcggcggttgttcgaaagttacttccggaggggaatttgagccccccgggaggcggagggcctcgcctggggcagccctgcgctttcgtgcggaggctgggccagaacccagggctcctcatggcctggtccgggcctttcctcccacgggtggagcagtaggagaaccctgagctccagagtgaatctggccagggttcgaatccgtatggctctcttaccgtgggcaagtcacggttcctctctggccctcagtttcgtcttctaaaatggacatacacgcttgtactgcggggtaaaccgaggtggtgaatgtaaagcccttagtaggtgcacagtccatgtttgttgtacgaattctaagagaagcgagaaatgaatatgagaaacatttttaaaatggtgacaacacatttagattaataattatattttgcagggcatctgcacaccagtttcagcccaccggctaccagtgtgactttgcccagagaggtggcttagctttgcattctaatctagttttgcgtggttcttaggaatttgttttaatgggacgggccaggctgtacaacccattgccataaagcggtaacttctttttctttcctttttttttttttaaagccattctatttatttatttagagacggagtctctctctcgtccacgctgaagggcagtggcgggatcttggctcactgcaacctccgcttcttgggttcaagcgattctcctgcctcagctttccgaatagctgggattacagacgtgtgccaccacgcccggctaatttttgtatctttagtaaagacagggtttcaccatgttggccaggctggtctcaaactcccgacctcaggtgatccacccgcctcggcctcccagagtgttgggattataggcgggagccaccacacccggcttttttttctttttaattaaaaaaaagttgaaatagagatggagtctcactatgttttcctgcctggtcttgaactcctggaggcaagatatccttcctcctggacctcccaaagtgtttgggattactggcaagagccactgtgcctggcctaaaacagtaacttctgacactggtttctattccccagtctgttttcagctgaattttcacaatagaatttaaagttacttcattagaagccaagaatggcctaccagcacagtacacaacattgggagatgaaggcctgtggcagtcgtgaaatctgagtttttcagtcttaagagaagatttagtatttgctaagtcttgagagctatacttgtctcagtggttttttatttatttgttttgaaatgttgacccattctttttttccccaataacctttttgttttagaataattttagatttacaaagttatcgcaaagatacttcagtgagtgcccatatagcccacgtttcccctattactaatatctgaaatgtcacaattactgaaccaatattgatacattattattaactctaatctgtactttattcacatttccttagtttttccctaatgtcctttttctgtcctggtattatccagggcaccctattacatttagtcatcatatctctttaggctcatcatctctgtgatcgtttctcagacttcccttgttttagatgaacttgagggttttgaagatagtactgactggtcagatattttgcagaaggacctttaattaggatttgcctgtttttgacatgagtaagatcagggtaatgggtttttggggaggaggaccactgatagggttcggctgtgtccccacccaaatctcatcttgaattgtagctcccataatccccccatgttgtgggagggtcctggtgggagacaattgaatcatgggggtgggtctttcccatgctattctcctgatagtgaataagtctcaggagatctgatggttttataaagggcagttcccctgcacacactctcttgcctgctgtcacataagacatgcccttgcctcccctttgccttttgccgtgattgtgaggcctacccacccatgtggaaccgtgagtccgttaaacctctttttctttattaattacccagtctcgggtatttcttcaaagtggtatgaaaatggactaatccaaccacagaagtaaagtgctattctcatcacatcatatcaagggtacatactatcgatatgagttatcattgttgacatctgttagcttgagccacctggcttgaggtagtagtcaggcttttccagtgtagagttacttttcctcctgcactttccgcactgtacttttggagaaagtcattatgtacagcacacatttaaggagtgtggaattatgccccatgcttaaaggcagagtatataatgcaaattatttggagttctctgtgggaaatttgtctgttcccctattttttgcttacagagtcatatatttgtatcggtgtgaactcatggatttgttttgttttgagacagggtctcccgctgtcgcccaggctggagtgcagtggtgcagtcttggctcactgcaacctccacctcccgggtttaagtgattctcctgcctcagcctcctgagtagctgggattacaggcacctaccaccatggctggctaatttttgtatttttagtagagagagtttcaccatgttggccaggctggtcttgaactcttgacctcaggtgatccacctgccttggcctcctgattacaggaatcccctctcctgggattacaggcgtgagccaccatgccgggcctgaactcatggatgtttattttatactttggaccagaatccagtactactttattttgttgctgaaattgttcctccattggccattgggagctcttccacttggctcctgtatccctttgacatatccccctctatatgttttgctttgttttgttttgttgagcactttctttctattccagactcatctggtatgtttctgccccagtcctagaattagccatttcccaaggagccctggctccttttattggagaatggcccagaaaacaagatctgggctctaggtatgctcagtgcttctcagtgtccttgcttctaggccttcgcagtggacagagtaagagacatacgtatatatgcacagatctagaagtatttccatatataaccacctgtatctacgttcagctaaacataactgatgtccaactcttatccatgactgcatggattgttctagcttggcagtccccaacctttttggcaccagggaccggtttcatggaagacaatttttccacagacctgggggtggggatggttttgggatgattcaagtgcattacatttattgtgcactttatttctgttactattacattgtaatatataatggaatgatcatacaactcaccataatgtagaatcagtgggagccctgagcttgttttcctacaactagacagtcccgtctgggggtgatgggagacagtgacagatcatcaggcattagattctcataaggagcacacagcctagatccctcacatgcacagttcacaatagggttcgtgtttctatgagaatctaatgcagccgctgatctgataggaggtggaactcagacggtaatgtgagtgatggggagcggctgtaaatataaaagaaacttcgcttgctcacctgctgctcacctcctgctgtgcggcctggttcctaacaggccatggactggtactggtctgtggcctgggggttggggacctgtgttctagcttccttctcttgcttgtctgtaacctcccactccacctgtgacaaacccgactcccaccattcaccatacatttacttaattgttccatttagcatacatgtatggtggttttagaattgctcccccgatcccctgtgggaaacaacttatcagctagagtacagtgtgtacgtgcagttccttttgccttcagtcttacaggctccactcgttttcaaagttacttaggtcagcaccctattcccccactaccctttcagtgaagttgtttaatacatttggattcagaatgtcacattctgcattccatcctggaacaccctgacttcatgcgtgtgtatgttggtgtgttttaaaaactgggtctcactatgttgcccaagctggtcgcaaactgccgggctcaagcaatcctcctgccttggcctctcacagttctgggattatgggtgtgagccactgtgatggccttcctatgtctttttaaaaatatttgcatacattaaactttactctttgtgctgtcaagatttttgggttttgacaaatgcttaatattttgtattcctaattatagtgtcatacaggatagtttccccttcttcagggattatttttaacttctttcagatttcacctcagcattcctgttggccttcaccaaaatatatctgtaagctgagaatttaccacctccacagctaccaccctggtgcaaatgtgtcttttgactgttaaagtagcctcttcactggtctccttgctttcagtcttgtcccctacagtctgttgtcaacaaagcagccagagggatcattttgaaatgagtgagaccatgtgatttctttgctaagaaccttccagtagttcccttttcactcagagactggccagagtcctcataatggcctgcagcttgcttacttgactgttcttgatcatgatgcttattcctgcctcagggacttggcccttgccgtccctccatcctgggatactctggcagatgtttaaatgacttcttcctttgctttcttctttcctctgttgaaatgtcacctttgcagagaggcccttccccgaccacctcatattaaatagtactatcctcttcttccttcctgtatgtattgtaatactcacccctgacattgcatgtgtatgtgtgtatgtgagtacttctaactgaatggaaactccgtggcagggattagaccagtgcctggcacatagtagattcacaataaatatttgtccaatgaattaatgtcttacgtcaccagtgtctggcattcaggggtgaacttcgcagtgtccagtaacctcatgaaattatttgccacgttcagtaataattaattatgcaccttttgttaaattctgatggggtatgaaagtcccctggtgtataaaaacctctacctgtaagcaagtctggagcaggacagggctagagaccaggatagcagctctgccctgactcatcaggagagtctagggaaacctcgtggcctctcagctcctccttgtcgttaaatgatgactctgttggttgaggcatctgctcttgctttcgaggtgggaaacagaggcataggcttagtcatttaccaaatatttatgagtcaggacctggaataaactcaagatgtacccaagatccttgctgttcaagagattacaatggatcaaatagaaaacagtagattccagtgtaatatttctcaaacaataagaaataacattctaaaatttgatccagcacatgcatgctcagatgtagatggatgttgaaaaagcttcaggatataataccggcccttaatgtgatactctttgatattttctattgttatttacctacttaaataaagtgctggctaataaaaaatgctggttgcagccccctaaatggttttcctggctcactaatgggccacagcctgcagtttgaaaacgattgacatactgggtaagcgccctgactctggggaagccagcccctttgaatcttgcctttgccacttatcagccaggttatccctgggtaggtcatataacctctccaagccttggtttcctcatcctcattagtaataccacctcccagtgtggtggtgaagtatgcgagttgctgcctgtaaagtgctgttcgcaacacctggccgttcatttgccgactgctgctgctgctggaacaatggccagggaacaaaacctgtcacagccagtcgaaggggtgtctcctagttgagatctgcaggatgaataggacttgtttgactttggtcatcaggaaaggaaagcccagaaatactggcaggagggctgggaagtaaagcacagaggtgcagagagaactagatgagagccgtacggcgcacagtgtgtgtagagcagtttatgtttccagaaccttttcacaaccaccctcctgttacacctgtgctgtccagtagggaacctttggccacatgtggctttttattgttaattagttaaataaaatgaaaaattcagtttctctgtaacatttaagttttcaacagccacatgtggctggtggctaccatttggagaacacaaatacagaacatttccatcactgcagaaagctttattggacagtatgacattataccctaacaaaagtcttgtgaaggaagtaggtagggcatagatttttcttagatactttattgtttcataacattccaaaaaattaaaactcatgacttattcaccttaacagcaactatttatgtttctgtagcatcttttgatctttagcccatgaaatcagcttatagatggttccaatcatagtgtttatacaattgcttatttttttcaattactgttactttgcaaagactttccactgacctgatacacaatgtttatatttgccgggttagtgaagagggattatgccatgatgtaccatcactgggttaactgcttcctgattgttggacgcctgggttgcttcctgtttttcagtattatgaatagtgctgccatgaacttttttgtacctgaaggctttttcttcttttgaattgtttccttactataaattctaggaagtaagttattcagtcaaaggatataatcacttttatggctcttgttatattttgtctaattgccattttttaaaaaaaggcctaaatgtattataggtatcattgttgcttggctcatgagaacatcccgtctccagaggtcaagagattattagcccaaagtgtagctacttgcagatagagcaggggcttttgtcctctgcttcccaactcttgccctatctttctattgtaccactccaaatatttcttatcacaatgttgctgttagtagtaacactagtaaatctgagtatttataagctcataaagcttgttacagccttaagcaaaaagcttggggccaagggcgttttaaaaaatgcacactttatgaggtgcaactgcggagaaatgaggacgcgttcttaagctttggtattcacatggtggtggtgctggtagaggctgttacatttcttccagtgaagctgttcttgcagccgccttggaattcacttcagggccagtttatgagccaccccaagtaatctgcttggagtctgagcatcataccttgtatttgaccaaaaatggtattcctgagctcagtgccacctgattcactgcacttggaaccagatgatgttgggctctttccagaagtcaaatccttcctgggaggatgaagatctgccagctctgaggattctggctgggaagaaaaagagcctcaagctttgaaggccattcccatggtagacagagctgatgtgaaaagtggccatcctgttgccccaggcacatgaccttctgaagtgaccaggctgaaagggaagcaatactcgtgtgtaagtccggctctgtttacttacgaaggttgtttttattattcttcggttacttcatgttggaaacatggtgcaaagcagtgaagcagcagagccaaggtggcggcaggcctttttttttttttgagatggagtttcactcttgttgcccaggctggagtgcagtggcgtgatctcggcccactgcaacctccgtctcccgagttcaagcgattctcttgcctcagcctcccaagtagctgggattacaggcacctgccaccatgtccggctaatttttttgtatttttattagagacggggtttctccatgttggtcaggctggtctcaaactcctgacctcaggtgatctgcccacctcagcctcccaaagtgctgggattacaggcgtgagccactgcgccctgtgaggcaggtctttaggattgtctctaccccagggcttccccacagaaatataatacagactatgtataattttacattttccagtagccacatttaaaaagcaaaaagggatgatgcctgtaatctcaacactttgggaggctgaggcaggaggatcacttgagcataagagtttgaggctacagtgagttatgtttgtgccattgtactccagcctgggtgacagagtgagaccctgtctctaaataaataaataaataaatgggtaaaaagaaacagatttttaaaaaattgtgacaaaatatatgtaacaaatttaccattttaaccattgttaagtttacaattcagtggtatttgcagtgttgtataaccgtcatcactgtctatttctagaactttttcatctttgcaaactgaaactctgtacccagtaaacaatatctccccatttcccttccctccagcccttggtaacctcaattctactttctgtctctgaatttgcctattccaggtacctcatataaggggactcatacaatatttgtccttttgtgtctagcttatttcatatatatttattcaaagctcataatgttttcaaggttcattcatgttgtagcatgtatcagaatttcatttcctttatggctgagtaatactccattgtatgtatatactacgttttgcttatccattcatctgtttatggactcttagttgtttccatcttttggctattgtgaataatgctgctatgaacattagtatcttgagtccttgctttcaattcaatttttttttttttttaaacaggatctctcaccccgtcactcagggtggcgcaatcacgactcattggctcactgcagcctagacctcccagctggagcaattctcctgcctcagccttctgagtagctgggactacaggtgtgtaccaccatgtccggctaatttttaaattttttatagcaacagggtcccactctgttgcccaggctggtttcaaactcctgggttcaagtgatgcttctgccttggcctgtcaaagtgttgggcttacactttgggcgtaacccaccatgcccagccaattattttttacgtgtattttttggtggcagggtggggtgggggcagggtcgggtgggggcagggtctcgctctgtcacccaggctggagtgcagtggcgtgatcgtggctcactgccttaagctcctgggctcaagtgatcctcccacctcagcctctcgagtagctgggaatacaggagtgagccaccactcctgcctaatttattattttttttgtagagatggggtctcgctgtgttgtccaggctggtctcaaactcctgagctcaagtgatctgcccaccgtggcctcccaaagtgctgagattataggcgtgagccactgcaatcgtttcagcatgtaatcaatatgaaaacattatgaatgagatagattacattcttattttcatactaggtctttgaaaatgggtgtgtaattagcatctcaattcaaactagctgcgtttcaagtcttaatagtcatgtgtggctcatggccaccatattggatagctcagacttagcaaaatattgcattgtggcacagatctctggaaacacaaagggttttagattcaagtgggcctggttccaaagtaaatttgcccctttatcattgggatgggcagaagaaagccactgatgggtgctgtggtaaagggggagcagttcagtcatgccaggggaagaggagggtgacaggagaggcatgttggggagatgacacttgagctcagccttagaggcagagtgggggctttgtcaagcagtcacagtgggaaaggacattctttgcagagtatgcagcttgggcagaggcccaggattttgaaagagcccagtgctcttggagaaccacagcagttctttcagcttgactaggatattaggagtgggggccctgctgagaggagaggctggagagctgggctgaggctggaccttgcaccactggccaccactgcccctgtcattcacgccatcagcagctcttgtctggcttattggcaggggcctcctcctggctctccctgtgtccactttgcctctccccttgttgtccctcctccatttaaaaatggaagtcagatcatgtcacttttctgctcaaaacccttcagtggctttacattttactcaatcaaattggaggtatcagggtccgcccccactcctctctgatcatacctccttccaccctccctcctgatcacttctctgcctgtactggcctcatttccccaccctggggcctccacacttgcttttttccctgcctggaacgtgtttccctcagatacacaaatggctccctctctcacttcttatctcttccactccattcccgtctctgttcttcagagagagccttctcatcacaaaataaaatgatgcccttaagttttttccaaaatgcttatcactacctggcatatcacatctcgacgtgttcattgtctgcttccatcctgagcatgtagaggctccaagaaagcaggggtttgtctgttttgctcattcttcagtgcttggtattcaagaaatatttgttgaatggatgactacatgaataaataaacaacaaaacctgaaacgtagcagcctttagtaaatgtatgttgatttgagatttttgttgaagtgcttccctttgcatttatttatttttctcaactttatgtttggaaaacatcagatacacagaaaagttgaaagaatggttcattgactgaccatatgttcccaacttagattcaagagttgttaacatttcacaattcctgtatatattcttgggtgtgtgtgtgtgtgttcaagttaaaagtcagttacaggctgggtgaggtggctcacacctgcaatcccagcactttgggaggctgaggcgggcagatcacctgaggtcaggagttcaagaccagcgtggccaacgtggtgaaaccctgtctctactaaaaatacaaaaatcatccaggtgtgttggcccacacctgtaatcccagctactcgggaggccaaggcaagagaatcacttgaacccaggaggccgaagttgcagtgatcatgccattgcactccagcctgggcgacagagtgagactccatctcataaataaataaataaataaataaataaatgtcagttacagaaatatgacactgaccctttgcatttacaagttggttctaaagagtggtgagtcagaagagacgtcaggcagcaagcgacttgggccatggcctctgacctagacttctcacctccggaggtgcccgagcccactttcctggagaacctgctacggtacggactcttcctgggagccatcttccagctcatctgtgtgctggccatcatcgtacccattcccaagtcccacgaggcggtgagtttttccctgggagcctcagctcctctgagtgccaggctgggttctgagtactaacagtaggtgccaccacaactgagatcagcagggtctacattgggcctttttgatttagtgtgcctctgaatttccacctggtgggttgaaccacatagctaatactttatttgttcatgtacccattaaggagatttttatttagtgcctactacatttcagactctgctgaagatgtagtgtctgcacctgaggagcatctagtccttgggaggaaggcagataacaaaaacatacctccatgtgctcccatgagaagtacagagtccagtgaggctatataacaagggggagagagacctgatcttaccctgggctgtgggccctgccgaggaggcagtgtttgagctgagactgaaggaatgagcaggcttctgccaggtgaaagtgggcaaggggcgaggacaacattccagggagagggcactgcacgtgcaagggactcaataaaggaaggggctaattcaaggaactgaatgaaggtgactgtggccagagcacagagggggcatgatgagtggtgcagccagaggtgtgggcaggggccagagggttttaagtgtgagaatgacatggtcaaattggcttttttgttgttgttttgactcttcttctgtaagtatctttataactatacaccctccttctacccactttcttgcccactcccatttgctcgtgacattgatttattggagaaagcaggtcgtttgtcatgtgggatacctacatcccaggaattggctattgcttctctgtggtgtcatttaacgtgtttctctgttccctgtgtttcctgtcaacaggagttccatgtagaggcctgattccattccagtcaggttattgggtacgaatacctcagagctggtgctatgtactccctactgtgtggcatcaacaagcaggtggtgtctggctgctgcacatttagagattcttggattgatcggtgggtttaggtggtatcagctgatccctccattataaaaatccggtcagtctttcacctaagcggttttagcatccattgatggtcgttgcttagatccattatttccttctgcatctgttagctggaattctttaacaaagaccttttccttatcacttgtatgattactctgaattgctcttcataatgaaaagcaggaaaaatgcttggttctttccctttatttatcaattttcaaagttgtgagttcagactctagcaacttccaatgatgaccaatgaagctttggttttcatagcattctgaacatatttttaatatatttaatatgttttagttttttttttttgagggcacttatctgccattaatttgttttttatgttcagtgggagcccctttaagttgatgtctttgttctttgtcatacttcattagtctttgatagcttccttgcttcatggttcaataagatgtcacaggctcttttttgtgtgtgtgcgagacagggtcttgtctgttgcccaggctggagtgcagtggcacaatcacagctcactgcaatctctgtctcccaagttcaagcaattctcctgcttcagcctcccaagtagctgggactacaggtgtgccaccatggctggctaatttttgtatttttagtagagacacggttttgccatgttgcccaggctggtcacaaactcttgggctcaagccatccacttgccttgagctcccaaagtgctggaattataggcatgagccactgcgcctggccccaggctcattttgtacatttcctgccccagtcttggaatcagtcatttctctaaaatgctctggttctttttagctagaaaatagtatctagaggctacagttgggacattagaagttttcagtgctactgagctgtgattgcatctaggcctttcaataaacagaaatagaaaataaacattttttaagaaatgaaaaagttgtgagttcatactggtatttccaattcaaatgtaaggtgatagtgtttctatttatttgattttatactagtgtcttgtaactctttatcttatgctggaaatcttgttctcaataacattaacaaaatgatgtatctgctagatcctactgaatctgaggtccccaggaccaccccaggttcagtgatgcactaggactctcagctgtggcagtgaaaggataccaggtatggcggcacagggaaaaggtacatggggcagagactggaggaaacaggcgcaggcgtctgagtgctctcccattggatacccacaggaaggatttgtggcaatgtgtgtgaagtgttatctagcagggaagtgagttagagactcagtgcccacatctcttactgaggactggttacagaagcacccttggcctagcatgtaccaaaattccagacttccagaaagcaagcaggtgttcagcatgaaccttattgtttacacagtataggcgtggtgagccactcttatcatttctgggaattgtgagaaccacctggaatccaagttcccagatgccagtcaagggccaaccttgcaagcatgcttctctaagattagcaatttatattaactttattctgctcatctacaatataccagttacacttttaaaataactatattttttactactaagactcagaatgaaatttaagacttctttgtgattcttttttggccttaaaatatgtctttgtggagatacaaggtcaaaatgttgtgtttagtaactatttttctctgtgtaggtctcccatcatgagatatagtttggttaatttgcttcaatctgtttttaatttttagagatttttaaaattttgatttaatttgttgttttaattatataaaacatttatatacaatatttctcaaagtcaaaactatataacaaggtacatttacagaagtttcctttaatctcattctcctccaccctattcccttccttcccacatagttaacagttgttattagtttatctttcctttgtttctttttgaaaacagtaacaaatgcatatatatgtgtatggtgtgtacatatatatttatattccccccttcattaaataaaagatagcatactattaaacacagttttgcaactttcttttttcacttaacatacgcaatatgttctggagatccatatatcttggatatcactgttcctggagatgctgcttctgtagctgggaggatgatggggaattactgatacaatgtggaacctattgatgcagtggagaactatggtgaaggaacaggcttagggtgggtgcagggaaggaacatgccaagttcagttttaaacagatactttaacatgtctgggtggttctgtcaaaaaagccggtggatttacaaggtctctagcaggaggagtgcatgggctgagtgttgaccagcatgtgggagttgatacgatgtcatttgaagccacggcaggggacagggtctcctaaggagagaatgtggagggagatgagaagaggacctaggccagagctggaggggctccagcatagagggcacaggcaggggaggagcagccagcaagggtgggaaaaccttggtgaacagggatgggttcgtggcctctaggttgtcttgtccatctcttattctggtatcttgagaaggagatcactattggcgttcttccacccacaattgtatcgcattttaaaaacatcacctctgtgctcctgggctctgtccctgcagacgtggcatgctattcggtattataaataacaaatgtggttgttggtggctgatgaggcctgctaagagtcccgagggagggaggtgatgagccttcttgttttataggcagaggtgtgtggctgtttggagagcagggaggctgctcacctcctgttgtgtttgaagcccttagaagtaagccacagaagcctgggttagttcagcaaacttcagaaaaggagcccctttattgttctctttaagattttcagtgggatagtgcgttaaagtcttttgaggcagggagttgatgaagggttcaaaaatatgccatcatacccccctacccactgccatttagaggttacttttggacaacaacctcatgtttttaaatttaaatatagtacatgacatctctcatttttattaatcttgcatttagggaaacaaggctcacacaagtaaattgtcttcataactgaagcttactgttttaactttttttttttttttttagcttttcaatggatcagtagcaaaaaaatacagtactgttgatctaactttttactggcgcatcaggggagcaaatggccccaggttatacagggggttctgtcgctagctctctgtgtgtctccataaggcagcctttctcacttccgaaactcctaactagatagaaaggaaacacagcattctgtgcataaacaggattacaaagagagggtggatgctgagactgtgctgcttagaggttgtccctaatagctgagatttggaaggagtttggaggggaaagaagggggttttaacatggggacggggtactcttagggagaaagggagcccatgggagtgggggcagcttgtaagacactaggcagccagagggcagttgggagatacctggaagtggagggtggcaggaggtaggagagggggcagaagtgagggtgggaggacccagagaacagtcttgccctctttgccgttttgctcagggcaaaatcttccctcttgcttagcctatagaaacagggtttattagtggctttttgggtcagaagataatatttttggctccagatgatgggaaagcctttgaaaagcaaaagaatgtttcctgttctagtaagccgattttttgcaacttgcttatgacttcagtatttcaatacttagcagattatttgaaagctcttttggggttaatcagggaggaaaagagggaacacatacaaatgcttcccaccccacccccttccttttcatagtaggagcaagagtcaatttgtaaaatcaaaaaccaagtccctagaatcgtaagccaaatgaaaaggttttctcattggcaactcattaaactcagacctaagaaaacaaacatttgtttgagcctgatggaggcgtgggccacacttaatccaagcattttcttgtaggctggattctaaaatagaagatagtaggtcctagtaccatttccatctagtccaggttagctggtaagtttcatctctcatgccaagtctgatcaattgcttggtggccatggtgaaaaggattctgggggctgctgctttgctctggaggaaagaaattgatcaatgatgtctgtttgctgtgagctgggattagagaatgacagtgccggtccttggactggccaatgattctccacaaggctgcacatagaaccatctggggaactttcaaaggcctagaccacacccagagattctgattcagttgttctctgaagccttggatcagtattttctttttatttatgtttttgagacagggtcttgctctattgcctaggctggagtgcagtggcacaatcgtagctcactgcagtctcgacctggactcaagtgatcctcccgtcctctgcctcctcagtagctgggactacaggtgtgctccaccacacctggctaatttttaaataatttttttgtagagacacggtttcactatgttgcccaggctggtcttgaactcctgggctcaggtgattctctcaccttggcctcccaaagtgatgggattacaggcatgagccagtgtgcccggcttggatcagtatttttttaaagtgtccaggtgattgtaatatgcagccactactcaagtctttagataatttccctcaaacacaaaccaattttaggaggacaggatatgttcagttcttagatgtgttaagtttgaaataatagcaaaatgttccgtgtgggaaaggaaaggcgagcaagaagttgggaatagagacctgacaattattttattaacagagcattatgatgcctgtaaacccagcacgtgggaggctgaggtgggcggatcacttgaggtcaggagttcaagaccagcctggccaacatggtgaaaccctgtctctactaaaaatgcaaaaactagccaggcgtggtagtgtgtacttataatcccagttgctagagaggctgaggcaggagaatcccttgaacccgggagatggaggttgcagtgagctgagattgtgccactgcactccagcctgggcgacagagcgagactccatctcaaaaaaaaaaaaaaggaaaccaaacaaatacagcattattacttgaaacccaagaatgagttgctgagttttgcaagggaaatgaagatccaggaaagacgtgaacttggagcatacccaacctgttgaagtagtttccgtgcaatgtagatagactgagaaggtgcgggtgctgtcctagaacccaagagcaggagcgccgcagggcctccggaagtggtgggaactgggacttactgctcctcactggcatgccctctgcctcccttcctgtctccctcctgtcttttgcttttctaactaggaccctgcttctctgcttgctggccctgtggtgagatgcagcacagccactaaacacaaccatgccttcctgctggtctcagttccagcatccccagggaaggaactgtggctgacccagcttgggacagctgtggccagtggaggggaggggagggttctgtggagtgacctctgagtgaggatgggaaggtccattcccacagggggactgctaggcagacaaagctggggtctccctttctctccctctctcaagtgacaggcagagcagtgggcaggagaccaggagagtgtggcctccctgaagtccaccgagtggttcatggagagcacatgtgacaccagttccctggagaggattggggaaagccagcctagtctgacaccaccactgtgttccagctgccgtccttcagagttgggtttcagtagaagaaagttctcaatagggagttcctggctttctagggaagtcctgggataggtttgaggggtctgtgatccccctcaaattgtgtacaagaatgtgaggttttatatgcctaggcacattttctgggggagatggtccatagcctctctacatggagtgcagtgggaagtgggggacaggtttcttctcaaggtggggagcctgtcttcctcctccccataaccctcctccaagcctcttccggatcgatttctacacagagtgttgattcagccagataaggtgcacgaaggtaactaagcaagtgggtgtagactttgagttcagcaacttgtgtggcagatagtcagtcatacacggtagtgaatcagaaactctcctagtttcagtgttgactattctcatctgttcatatgcttatagtgcatctcgtcagctcacagccagctgcctgcttctagaaggcaggtcctttcacttctactctgccatgtttgttgattgccaccgtctcatattagtggggactcttcctgttgcaagttcagaaacagctccagcagcttccccgaatggaaacagtattggctcttggaactgggaatttcaaaggacagctggatttaggggttcaaggggtctccagggcttcatgtgtctctctctctcctggctttcctgggagtgctggcttccttcctaggcccttgttctgtgttgggaaagatggctgcagcagccacagtcagtgcccttatcagtcgggattgacaggtgagagaagccatttctctgcctctcctcaccttctgagtctcatggaaggcctctccttggccacatacaccttgtctcacaggtgggaagcaggaatgagtgctgtctctggccaggccacatttagctgcctactcttgtgaccccagtgactgagagtcccccagacccccatgggatagggaaagggcagggtccccatggaaaagaggtgctgggaagacagacagccggtggccagcattgcgatctagtggaggactcgccacgggcgatggtgagagtggtggctttcaatatgatgcccgtggagacttcacaaccaaccagaaagccctgcagtgtttagacccctgatgatgttttggctcatcagtatggtgagccacctgcacctactgcaccacaggtggctcattcctgtggtgcagtaggacagtggcctagaaggtcaggactcttctggaaaattttgcacaagggtcttgattttaaacgaggccgctagttgccagtgaggcctgccgtaaataaataatgagccccaggcaagcatccacccattctcaacacctcaggacacagactcacagaagcaactgtgcatttctgctctgtgtggttttaaagcttgggaggaggttgcagttgaattgagaggcaggctgttttttacttaatgacccgttctggagagattgccgtgtgatgagggtataaacatgcttccaccagcctgtggtctggagatgtgtaccgaccggttcttgggagagacggctggacacacaaggagccacagagcagccagtggggagggccagcatagtcgtgctgaattgtgtctggaatgagctcccaaggctgttctttctaatcacagttctccccgcctgccaagcgcatcctggactccgtgtctccgtttgccttgttgagtccacatggatggccttccttgctctctgtttcagccagtcctatctttcctcaaggccactgctagtttcatctctgcgaggccttctcagctcccaccctgtctcaggccctcatggcccgctgggatgggcagcaccttcagcgttaagcagactggtctgagtgctgacctgcttttagtctgcctccgtcatcagaagaggatattcctgcctaactccattgttcttagagggtcatgcaagataaggtgcacgaagatgcctgagtatagcacctgggccattttcaaggaaagagtggcctgcgtagaatgacattttgtcctgatttacaggactaaatccacattgaactgtagagtggaaatcataaaattcaatgcacttttcatgctggaagggatatgatgtattgtggcacacatttgattatttggatctgatgaatagcagcaattttctggcctggtaagcgctgcagagctgcttcattattgatggggcctgtgtccacagaggacgccactgtgaacccaggagccacctggcctcgggagttttcttttatatgtgacagtgtgattgctgaggaaacttgaggctcgcttgagaggaggcgcagtgctcccagatttaaaggcagggctgtcggctttgtagtctgccgtctgtgtggctggtacgggcagcgtacatttgaggagaaatgaaaaggcagcccttaattgagagtcattcttgtcagtgaagaacttggagctacaggccctgtgtggctgggaccccagggcccaggtcatgtgggtcacggccgcctttgcttccctgcagcttgcatggggccgtcacctggcctcagggagcctgagtggccttgccagtggagtgtggctcgtggtggctggctcaccagggcgatggagaggctcggtgagcatccacatggcacacagccactaagtgtgcgttctcatcttcattccccgtggcacagtgcccacatgtactgggtgcaggtagagatacagaggaggaaagggagcagagtactgggagacactggctggccagtatctcagggtgacaagagtaggctgcacgacggggcctgcctggagacaggggccaagaccgagcaagaggcctggagcccctgctgggtgtcttggaatttatctcacacaaaggggaaccagcaaagtttttgaaggaggaaacagacacgattgggattgttgttgtcattgttttttttatttgtttgtttgtttttgttttgagcgaaactttttttgagttttgctcttgttgcccaggctggagtgcaatggcatgatctcggctcacggcagcccccacctcctgggttcaagtgattctcctgcctcagcctcctgagtagctgggattacaggcatgcaccaccacgcctggctaattttgtatttttaatagagatggcatttctccatgttggtcaggctggtcttgaactcccgacctcaggtgatccacctgccttggcttcccaaagtgctgggattacgggcgtgagccaccgcgcccggcctgttgtcattgttttaggaaaatcgactctgaaaggaacgtaaagtaaactctgacgagcatggggaggtagaggcacgggcaggagagtctgtgggaggcagatgcaaccagtggggccggcaggggacctgggtctgatctgggcagtggagtgtgtccagaggggactggctgggtctagagcccgttggaaagcggaatggacagaccttggggacaggttggatgctgagaactcataaatgacttggaggtatctagcttgggtaactgggtgcgtgacggctctaaaagctgaggtagggaagagaggaggaggtctggggtgaggaggagacagatcaagcattcagatgactcgataactgtaatatgtacacacacccacagaagactcccttcagctgtaaaaaatcaagcgtgatctggagcacaaacccacttttctgattgctgtagggactttagtcacaaacaaggggttgtaggtgacccattgacagataggttctcagaggagctgtacttaccattccagaggcaccttgtggttctgggggctgctaagtagagagtagatttcatagttaactcagattcaacttattcctacccctgagggccccaggaaacctgggagaggctggaccgtgtacccatgaagaggttagtttcaaatcttgggtctgctactcaccagctaaggccttaggcaagtcatatgacctgagtgtctgttcctttgtttataaattgggcctcattatggcactttgtgaggccgtcatgtccagacacataacacagggtctggcatattataaacaataaataattagcagctgttgtggctcttgttttttagagagggaatctctctctgttgcccaggctggagtgtagtagctatttacagacacagtcatagcgcactacagcctcaaattcttgggctttagtgatcctcctgtctcaacctctcgagtagctgggaggacaagcatgtgccaccacgcccagctgttgttattattggcagctatgcttaaggcataatttaggccagggtatgtatattcggttttaagtctgttcatatcctctgtgatcatggaaaagtgaggcctggttttaagtgctgtattttcatgggaataaacaagaatgaagttctcatggttactgggagaccttggctgttctttcatttcattcattcattcactcattcattgattcagcaacagttgaagctatcccaaagtgctcatgggctaataggggagactaacatgaaaacatgtaactggctgggcgcggtggctcacgcctgtaatcccagcactttgggaggccgaatcgggcagatcacgaggtcaggagatcgagaccatcttggctaacatggtgaaaccccgtctctactaaaaacataaaaattagccagtagcgggtgcctgtagccccagctactcgggaggctgaggcaggagaatggcatgaacccaggaggcggaacttgcaatgagccgagatcgagccactgcactccagcctgggcgacagagcgagactccgtctcaaaaaaaaacaaagaaaacatgtaactatgggaaaataatagtggcattatgggctgggcgcagtggctcacgcctgtaatcccagcactgtgggaggctgaggcgggtggatcactggaggttaggagtttgagaccagcttggccaacatgataaaaccccatctctactaaaaatataaaaaattagctgtgcgtggtggcgggtgcctgtaattctagctactcaggaggctgaggcaggagaatcacttgaacctggaaggcggaggttgcaatgagctaatatcgagccactgcactccagcctgggcaaaagagtgagaccttgtcttaaaaagaatggtggcattataaggttcctgggtgcctaggggcccgaggagggaggaggggctgcccccagctggaaggaggagcagggaaggaaggctagacagtgagtaggagtgtattcatggacagggccaaaccatgggagcagtttgccgggtggccaaggaaacaggtattcctgttgatgaaggtgaccagcggaagctctggggcctgactcagtgtgagggatgaagaggagcccatgtgaggctggagaggtggcctttcttagatgccattccagagacagccactggaagctttaaggtggaaggtgcagtggtcagacctgcactttagaatagttcctttcgtgggtgcatgaggaatggacagagacagcaggcactttgcttagctgtgggcggaactgaagggggaattggatgctggagagagtagcagaatcaagaggtagagggggtcatgtcagcaggacatggtgacccactggacagtggggagcagagagagggtgaggttaccgggtctctggttgctccaccagtgggaggagggccgggccttctgggtctgggacagttaagttggaggtgccttggagatgccagtcctgattgtctggcagacagctggatcaagggagaggtctgggaggtgccagaatggttgaggctctagagacagggcctgtggagtgagggaggcactggggcggcaactgggtctcactgtccctgtggtctctgaactgagccccactgaaactggaggagcccccagccttgagctcagaaggcagactccttcctagagatccaggcaggccttgcaaattttgttttgttttgttttggccaagttacataaacagagtagggggaccttcagatcattttgatttttggtgggaggaggctcagcaggccgaaggaatccagcactgcagtgagaggcctggctggggaggggaagccctccagttatcttgggacaatcactccttgggggcctgggacctggctggctcttcatatctggttatctcgcctggctgatgggagacgatgttggccgataggagggagctgacaggcctctggatcagatccgaggcagggactgcccttccctgcatgggccctcctcttctgtagggtgggctgaggcttgggccacgggccaatggggcaagcagggaaggtcagggagtaaagtgagctggaagccggggttgggaaatgaaacacagaggggtatttttctcatctggaagtgtcccccctcccaggagtcttagtctgcttcttattttcccatttctcaataaagaacatgggcactgagaaacatttcccaatcatagtgctgggggcggcagggtgtgggggccacggtcggcacctgaaaaggggcagcgcctcctcagcccctcactgccatgagggaatgcagggccattgtcaccggatggttagtttcaagagaatctaggaatccagatttcatgggaaatctcccaattggcttaaatttttaaataaacactgccggccagatgaagtctgtggcctggacgaggcctgtgggctgtggttggcgttctctgggctagcccggcctctctgacgtccgtcctttctggccacggcacactgcaagttatcacccagaggaggagaggacactagataggagcacactgagcctattccagatacttctctgacatgagcctgagtggctgggccaagctgtgtcccttccctggagtctcccttccttatcagcacaatgaacgccagggctagatctgtgggtttcaacctttcgttccttagcagcagaactttgtttcatttcaatcttacaagggacaaatcacagtgtatgaaatagattgaaaatcagagctgctcctgtcgcccagggagtctggaattctgccccgaggctgcctctgccctcccccacagaggcacctctgacaggctccgcagaacacagtgtgggactgcccacctgccggctggccctctgcacccctcccagtcctggcattctgtgggttgaatgggaggacaagaatggcagccagaggagggcaagccacagtgggtctgccccatagccagctcctcgcccacattttgtccagtccctggcacgaggtgatcggccagtcactgggtgcagctggcacttcctgggtgctttccacgtagttttgcctcctcacatcagccctgtaaggcgggtgtggctatttccatttcacaggtgagtaaaccaagacacagaaaggggaagtgagtttcacacaaggtcagttggctggaaagggaaggatcccaggttctacctgggcgtctgagaccccacaagctgctccctccccgtggggcttcctttattcttcactgagagccacgatgctccggggcagtcccacatccgtgtgggtggtaggtcccgggaatgacagtttccatctcttgtgtttctgtggcatgcttctttgctttcagatgtgatctccttttgctggcgtcaggcttgatccatctaagcaggactctcctttttatcacctcacaggaggctgaaccgtctgagcccagaagtgctgaggtgacgaggaagcccaaggctgctgttccttctgtgaacaagaggcccaagaaagagactaagaagaagcggtagaagaggaggcctgaggagctgggcgggcagggagagggtcttggggacagccctcctgggaatctacattgtgttcccccgcattccaggctcagggtctgaggaggctgtgacgccctatgaccgcagagatctagacagtcgtaacagtccccaggctccagctgggcaatccaccacttcctcttccttctgcttctgtgacggtttagagtcaagggggctgaaacacactgtgagcatagactgtattaggtttgttcagaagccgggtcagctcacagagtcacattttcttgcttagtcatgtgtccctccttgagttgccccctccttgtgggtttacactacatttgggagtcattgtctaatgctgacaagcacaccctctcccattatttgtgcactacagatctcctcctgatcagtcacctttgttgctgctgtgtagacagagccaggcctcacctgtttgtttaggccaagatgccatggacatgcagcgttagtgatcccactagctgtgacagccaggcccagaaaatgcctggcgtgagagccagcagacagccaggccagggtaggcagtgcctgcttctgctccatcaggtgcaggggatttggctgaaggcgtgcatatttcctgggcacaaacttcctgagcctctgaaatgggaggctcgtcaatttcagaccaacctcttttcaacccatcatagcacgttcaaggtgtgccttttacttctacctgtacatcccccatcccttcaattctttcattccctgaccagtgagagggttcctgggggaagtatggtgaataaactgacatgcatgcttcagaacctgcctgtgttgtcttttgctgagggagaggggaagcctagggccctgccccggggatgagggaaaggcttgacccccagagaagtgggacagtgggggtgaggatggccagaataggatggcttcggtaagagcagttctgcaggctgagccattctggaagaagttttcaggaaggatccggctaagtgcttcgtgtggcccttagtcactggaaacacttgtgaatggccgtgggtgtgttagagtttccactgggtccaggccccactcattccccaggttccttctgaggaagatgctgcttgtcttcaaagtggcttgagaaaaaccaagtgcaatacagtaaaaggccttacgtggcattggccaggtctagtcacttgccctgaatcagctgctgaggaaaagccctgacctcttggtaactcggatttgcccagctcatttacagcctgccagacagctttcccaaatgccaggactgatgaggatcttaagagatgagcgactatcatctctgttttggagatgggaaactgaagtccagactactttgagaatgtccaagctgggatttagacccagcccacggcacattccttggtatttaacaggtatttagcgagtgttggtaggcacagtgctatgagggtcctgctctgctgcagaggggcttggcaagatctcccagcacttcaggtttcaggagaggaagtccaggggctggggattgtgcataatgaagggctagatactggcttgagaaggagcttctgcggattgtttctgtttcataacacttaccgagagcttcaatgccaggcaccatgctaggaactgaggatgcagaaataaggaaccttcccggaaacccagagtgcacctggctgagtgggagacgcagacatgtaagcaggtttgatgtggggagtttctccaacagaggagcagcaggtgttcccaggggcacccagctcaatctcgaggggtcggtgcagccacctggcagagtggaagtgatggagctgaatcttaaaggctcagcaggacttgagaccacagggaaatgaggctgggagagcaggggccaggcctatagtgcagacctgtttcagcttgtggaggagagacagcttctggctcccgggagcagtgctacctcaatagatccaacttccttaaattctttcccttaaaggctgggccagagaatggccctcagaaagcaagggctgtcatcctctgctccaccaaacccttcttccacatgtactgtgggcagagtttgcagcatttggttctcttggttttcgggacccatcctctcccgatttccctcctgcattactggttcctcctcttgagaggggcccaggcttcagtccttagtcctctatcctctgttacacagaagctccagtccctagacttcctctctgcacgtactcctttgaagatctcatctaggctcgtggctttaaataccacccgtattaggattttccagagaaacatagaaggagactttaaaagtttgtattttttgagatggagtcttgctctgtcacccaggttggagtgcagtggcgcgatctcagctccctgcagcctccgcctcccgggttcaagcgattctcctgcctcagcctcccaagtagctgggattacaggcatgtgccaccacgcacagctagtttttgtatttttagtagagatggggtttcgccatgttggccaggctggtctcgaactcctggccacaagtgatccacctgccttggcctcccaaagtgctgggattacaggcatgaaccaccgtacccagcgagacttcttacaagatattgtctccagtgattatggaggccgagaagtcccacgatctgctgcctgcaagctggaaacccaagaaagccagtaaggggccgatggtgtagattctgtctgagtctgaaggcctgagaacctggagtgctgagagaagacaaatgtcccagctcatgcagtcagacagcgggagggcgagtccaaccttcctctttttgttctgttcaggcccttaaatggatgaggcccacccgctttactcagtccacagattcaaatgctaatctcttccggaacacagacacacccagaaatactatttaatcagatacctgctcgtcctgtggcctagtcaagttgacatataaaattaaccatcacaccactcacatgctgatgtctcccagacggatctctccagccctactcctgagctccagactcacatatctgacttcctactcattatctccatttgaatacacaacaggcatctcaaagcacattcctgatctcaccagcagccccaagcctgctcttttcgtggtcttccctatcttaaagagcatcttaagaaaaacaaagtatctatttaaaatatacaacttgctgatttgatatacgtatatgttgtgaaataatcaccacaatcaagctaattaaaatatccatcacctcacatagttatatgtgtgtgtgtcgggcggtggggcgtgggggtgagaacacttaggatcttagaaaatttcaagtatatacggttgacccttgagcaacatgggtttgaactgtgtggtccacttatacgcagctttttttcagtaaatacaattccttcatatccacatccacatctacaaccaagggcatatcaaaaatagtgtttgtgggatgcgaaatccacatatatggaggactaacttctcctagaggtgggtttcacagggcccacctcgagacttgaatatgtgtggattttgatgtctgtgggggtcctgaaacaaatcccaggcagatacccagggatgactatagtacagtatcattgtctatagtcaccgtgctatacattagatctccagcacgctttcatcttgcataactgaaactttgtgccccttaaccaacagctccccgtcacccactactcccagtccttagcaacctccattctactctctgattttgcaggtttgactattttagattctacatataaatgagatcatgcaatatttctcgctctgtgtctggcttatttcacaggtccattcatgttgttgcaaatggcagaatttcttttttttttttttcttttctgtttttttttttttgagatggagtctcgctctgtcacccaggctggagtgcagtggtacgatctcggctcactgcaacctccacctcctgggttcaagtgattctcctgcctcagcctcctgagtatctgggactacaggcactcgtcatcatgcccggctaatttttgtatttttagtagagacagggtttcaccatgttggccagactggtctcaaactcctgacatcgtgacctgcccgccccggcctctggggttataggcgtgagccactgtgcctagcctggatttccgttttgtggttttttttttgttttttttgaggcagagtcttgctctgtcgcccaggctggagtgcagtggcccgatctcggctcactgcaagctccgcttcccaggttcatgccattcttttacctcagcctcccgattagctgcgactacaggctcccaccaccacgcctggctaattttttgtatttttagtagagatggggtttcactgtgttagccaagatggtctcgatctcctgacctcgtgatccgcccacctcggcctcccaaagtgctgggattacaggcatgagccaccacgcccggcctcctttttttttttttgttaaggcttaataatattccattgtatgtacaccacatttcctttatccattcatcagttgatgaacatataggttgtttctgtatcttatctattatgaataatgctgcaataaacataggaatgtagcatttctttgagatactgatttaatttcctttggataaatacccagaagtgggattgttggatcatttggtagttctttttttattattattttttgaggagcctccacaccattttctataatggctgtaccaatttacattcccaccagtagagtaccaggttccaatttctaaacatctttgccaacagttaccttttgtttttaaaataatagcccctctaataggtgtgaggtgatatctcccggttttgatttgcatatttagtgatgttgataacccttccatagacctgctgaccattagtatgttttctttggaaaactgtctatttaggtcctttgaccatttaaaaaattgggttcgttgggttgtttttttgctatggagttgtatgagtttcttatatattttggatattaataccctatcatatatatgatttgcaaacattttcttccattctgtagatggccttttcattttgttgattgtttcctttgctgtgcagaaactttttagtttgatgcagtcctattttttttatttttgtgtttgttgcctgtgctttagttgccatatccaaaaaattgttgccaaggccaatgtcaaaatgctttttcccggctgggtgtggtggctcacacttataatcccagcattttgagaggcctagctgggaagacatttgaggcccagagtttgagacgagcctgggcaacatagtgagaacatagtgagacaccatctctgcaaaaaaaaaaaaaaaaaaaaaaaaaaaattaaattacatatatatgattttaaaaagctttttccctgttttcttctaggagttttaaaatttcagattttatatttaagtgtttaatctattttgagatgatttttgtatatagtataagggttcaatttcattattttgtaagtggctatctagttttccaagcaccatttattttttatttttttttgagacagaatctctctattgcccaggctggagtgcaatggcacaattatggctcattgtagccaaagactcaagtgatcttcctgcctcagcctcccaagtagctgggactgcaggtgcacaccaccacacccagctatttttttattttttgtagagacagagtcccagtatgttgcctaggctggtcttgaactcctgggcttaagtgatcctcctgcctcaccttcccaaaggtctaagattacaggcttgagccactttgcccagcccaacaccatttattgaagaggttatctttccccttttgtgtattcttagtgcccttgtcaaagattagttgaccatatatgcttgggtctatttccaggctctttgttcttttcaattgaactattgtttttatgtcagtaccatattgttttgattactagagctttgtaatataatttgaaatcaggaagtgtgatgcctccagctttgttctttctcaagattgctctggttatgtgaggtctcttgtgggtcatatgaattttgggattttcttttttatttctgtgaaaaataccattggaattttgatagggattacatttcatctgtaggttgctttgggtaatatggacattttagaaatattaattcttccaatccatgaacacattggaatatctttcacttctctgtgtcttaaacaacatcttaattcttccagttgcttgggccaaaaaccttgaagttattcttaacttccctctctctgtcatactccacttctgaccctgaagtatctccttgacactcaaccttaaaaatccagaatgatactatctcaccacttcactatcctcatctcacctggatattgcagcagcctcctcactggtagtctgttctcaaaacagcagtcagagggatcctcttaaaacttgtgagatcacctccatcacctgtccccatctcactcaggtaaaggccaaagtcctcactgggacccacagagcctgcaagaaccacttcacctccttcgcctctctgactccatttccctccactccttccttgcccacttcactatctaaaggactaaatcactaatggcaaaattgtgctcatcaatgaggaagagactctagagaagagttttgtttttattttttaacttattggagtaaaattcacatgacataaaactgaccattttaaagtatacaattcagtagcattttagtgctttcacagtgttgtatagccaccacctctatcttgttccaaatttatatattttttagaggcagggtcttgcttttttacccaggctggagtgcagttacaccatcatagctcactgcagcctcgacgtcctgggcccaagcaatcctcctgcctccgctttctgagtagctggggctacaggtgcataccaccaccctcaactaatttttaaattttttgtagagacaggatctcactatgttgcccaagctgatctcgaactactggcctaaagtcatcctcccaccttggcctcccaaagccttgggattataggcgtgagccaccatgccccgccagtacagccactttagaaaactggggtttctgggagctaaatgatgagaacttatgaacggaaagaaggaaacaacagacattggggtctacttgaagggggagggtgggagggggagaggagcaaaaaagatcactattgggtactgggcttaataactgggtgatggaatgatatgtacaacaaactcccgtgatatgtgtttacatatgtaacataccttcacatgcacccctaaacctaaaataaaagtaaaaaaattaaagaaaactggagtctcttttaaaaatttaacatacatctaacctatgagccagcattccactcctagatattacccaagagagacgaaaatatttgtccacaaaaatcttgtactaaattcaagctagattgttcatagctgctttattcatagcagtcaaaaactaaaaatagccctgatgctcatcaacaatagaatgagtaaaatgcagcatatttatacaatgaaatactacacaccatcaagaaatgatctactgtcaggcatggtggctcaagcttgtaatcccagctactcaggaagctgaagtgggaagatcccttgagtcctggagttcaaggctgcagtgagctatgactgcaccactgcactccaatctgggtgacagaatgagatcccgtctcttaaaaaaaaaaaaagaaagaaagaaatgattacagatacacacaatatgaatatgaatgatttttgactttaatttttcaactttatgatcctgtgaaagagatacatgttcagtagaaaccgtattttgagtacccgtacaaccattctgtttttcacttcaggacagtattcaataaattacctaagatattcaacacatcattatacaatagactttgtgttaggtgattttgcccaactgtaagctaatgtaagtgttctgagcgcactcaaggcaggctaggctaagctaggatgtttggtaggttaggcgtattaaatgcattttttttacttttttttttttttttttttttaaagataacttctcactctatcatccaggctggagtgctgtggtatgatcatagctcattgtagcctctaactcctgggcccaagacatcctttcacctcagcttcccgagtagctgggactagaggcatataccaccatgtgtggctaatttttcaaaaatttttttttttgtacaggtggggtcttactattttgcccaggttggtcttgaattcctggcattcaaagtactgggattataggtgtgagccattgtgtctggcttaaatgcattaaaaattttttttgtcggtatagtaggtgtatatgtttatggggtacacgagatattttaatacaagcatacaatgtgtcataatcacattgaggtaagcatttatcatttctttgtgttacaaacaatccagttatattcttttagttattttaaaatgtataacaaattattgttgactgtagtcaccttgttacgctatcaaatactagatcttattcattctaccaaactccagccattctacctaaccgttgccccttcccctgccgaatgcatttttgacttaatgatattttctatttaggatggatttatcaggatgtgacaccattgcaagttgaggagcatctgtgtactgtctggttctattccagtgaaattctaaaacagacacaactaacccgtggtgatagaaagcagatctgcggctgcttctgggaagtgggttgactaggaaagggcatgagaaaactatctgggatgatgaattttttctttgcttttcttttttgaggtggggtcttgctctgtcacccaggctggagtgcagtggcgggatctcagctgacggcagcctccccctcccaggctcaagtgatcctcacacctcagcctcctgagtagctgggaccacaggcatgtgctaccacatccaactagtgttttgtattttttgtagagacagagtcttgccatgttatccaagctggtcattaactcttgggctcaagcgatccaccccttgacctcccaaagtgctgggatcacaggagtgagccaccacctgcaccacctgctggaaatgttttatatcttgatatgcagttatccaagttgactgaatgcttcagatctgagcattttgttatgtgtaagttgttttttcctaaaatatttttctaggctgaggcgggaggatcacttaagcccaggagactagcctgggcaacatagtcaggccctgtctctattaaaaaaataaaaataaaaaactttaaaaaacttttcctgtgggtcaggacgtaagctatgtgtttgggacacagtatgtcatttaacttgtaagcaaattcattaaggtagatattattgtctctgccttacagatgagaaaactgaagctcagaagggttaaacaatttgcctcattaagaaaggtgggattaaaacccagcactatggccgggctcagtggctcacgcctgtaatcccagcactttgggaggccgaggtgggcggatcacgaggtcaggagatcgagaccattctggctaacacggtgaaaccccgtctctacgaaaaatacaaaaaattagccgggcgaggtggcgggcgcctgtggtcccagctacttgggaggctgaggcaggagaatggcgagagccctgggggggaccctgcagtgagccgagatcacgccactgcactccagcctgggcaacagcgagactccgtctcaaaaaacaaaaacaaaaacaaaacaaaaaaacccggcactatgacccgaaagcccataccttaagggttacgtcttctctctcaacccattcttttccctaagattttacaaaagaggaaactgagtcccagagagggttggagacatactcaatgccacttagctctttggaatcagcatggaactagaatccaggtttccagagctttcttactgcatcccacttgggcaaagaagtcaagctcactcccacctccacccagctggaggttgggaactcaaagtataatttctaaagacttgagtataacattcacgttatgggaggcccaaattcagggcatagatatcctgtgacttcaaaatgagagactgtgctttccatctgtctttgtattattggagtcattccaggctggttttctgtgaatcacagaggcttgccattcaccctgctgcaattatcccattttacacccaggacccccaaccagactcacctattccctccctccgtggctttttgggtggcaagatttccaatccaacacattccacaagcttccctctgcttaatttaagaggagctagcatgagtttctcatctgctccttgactctcagagttctgacatggattcatgtcaagaactacaaaaacagccaatctaatttggttttaacccacatccaatcaatcaacaataagagtggctgttgtcaggttcagcccatcacattgttcaaaatcagtgtcgtctcttgtgttgttagaaggtaccatcttgtgttttgagagaattaggcttaaatggtgatgatagattcctcccaaaaaagcttggttctccgggaggaaaaaaagtcgtatgtgtcccagcttctttggccttcttctgctaaagagaagtttcattaaaaaatgctggcccggtgtggtagctaatgcctgaaatcccagcactttgggaggccaaggtagaaggattgtttgagcccaggagttgaggatcggcctgggcaacatggcaagacccccatctctaaaaaaaaaaaaaaaacacccaaaattagccaggtacggtggtgcacacctgtagtcccagctactcgggaggctgaggtgggaggatcgcttgagcccagggaggtggaggctgtagtgagctgtgatggtgtcactgccctccagcctgggcaatagagagagaccctgtctctgaaaaaaaaaaaaaaaaaaaagtctttttctcctccttaaaagtcacagagtatgtttcatgggctgcctcttctctggaactggcaagtggtgctgtgaatgaatcaccctgtttcttgggaatgttttgctccaagagctcaagggggtacaacaagatgataaacagcctcttgaaagggcctctcctccccccgctgcggggcttggagcctgtgagttcacggaactggacagtggccgagctttcagagactgccgagtccaactcagttttgcagacgaggaaacctgggctttcacatttatggaaacggagccaggagcagggccgaggccatgtgaatacgacccatccccactgctggcgggcctgtgggccgaggccatcttagtacgacccatccccactgctggcaggcctgtggttcatcccgcatcactctaagcttcagcctccttctctggaagatgagggcaggatgcctgatgttccctgtggtttcctatcattcagggatcctgagtctttgctcctatgtagtcacttggtagaaacgccgaacctgaaatgtggcactttgcttctcaagccagagaaggatccaggcttatggcccttagcaaaagcccaagcggttcagttcagctcaggtgggttcaacaaatacactgacgccccggccctgtttagcccctatgctgggcatcggggatgccaggtgaatcagatctggccccagcctccaatcagtggggctaggcagacacacagacagactatgaccataggctgtggcaagcctggggatattaggcctgaggggctttgggaacacaggccagggcctaaccaagcctaggggagagccaaggagggcctctggggcaggtggccatgttggagggttcgcatctggcggcactgatgagaggaggtgacggacaaatgggatgagaccttgggcaaggcccttccccagtctgggtctgggtcttcccagaatgcacttgcaggggatggcggaggtctccctacctctggacttcttgggtggggaaagtgttaatgttcgttgtgagcttggagggcgcccgtccatggccaggagagactgtcctatcctggcacccaaggctgtggcctttttcacctcctacaggtccagagtcctctgggagcataagggcgctgcctggcagccctctcagctctgactgagtcccaatgtgtgtgggaacacctcgagctgggagaggggagagtaaggcaccctgccctctcctgacccctgccttgtcctcagtccattggagaattgctgcaggcaagaaacagccctcaataataccaaggactgaggtgcacagctgctgatcagtaccaaaaaggaaactctttgtttttttttttgaaacagtccccctctgttgcccaggctggagtgctgtggcatgatcctggctcactgcaacctccacctcccaggttcaagcaattcttgtgcctcagccttcaagtagcctgggctacaaacacatgccaccatgcccggctaattttttttattttttacttttagtagagatggggtttcaccatgttgccccggctggtctcgaactcctgacctcaggtgatctgcctgtctcagcctcccaaagtgctgggattacaggcgtaagccaccgcgcccagactcaaaaaggaaattcttattctgaagtgtccgtctctgacaaatccctggagtctctggctctagatgggcaggagagtatcctgggaccccagtccctgtaagcggcgtctgtctcccccctgccctccccagccaggcttagctgcctccacctctcctcccactctttccaggacctctagtggtctagctcccgcctctactcccctgaaaccttactccctgaggtcagctggagctgctttgtgattggtggctcaatgacctggacactattggccctgacttatctcacgtgatctcccagcaacatctaatcccagaacaacatccttccaggaagcctataaccctctttggaggcctcttcctgcagcgtattagacatgaggactccccctggctcttcctggctttctcatcctttacaaaacatcatattctgagcctcagcttcaccatcagtgaaatgggaataatgatacaggttgagcacctcaaattcaaaaatttgccatccaaaatgctttaaaatatgaaacttttagagcattgacatgacattcaatggacatgctcactggagcatttcagatttcattttttattttttggattagggatatatataatgcaaatatttcaaaatccaaaaaaattcaaaatggaagcacctctggtcccaagcatttcggataagggagactcaacctgtagcactttttccaatgggttgcaatgagttaatgcatataaggcacttggcaactgatgcagtgtgttcaaaagtgttggttaaattattcatttttttcaacatctccatggatatctaacaggtttgcccaaaataatttggccaaaaccaaactcgtgactttttggcctcagtgggctcctacccaaccttccccatctcagtaaatgcacctccactcacccacccaaagcctgagaatccgtcttgagctgccctctctgtgcccacacccctcatccatcagcagggactgtgggtgcttcctcctaatgcactcaagtcatccactctcaccacctcccctgccaggcttgcaacattttccctccctcctggaggacatcccagcctccttgctggcctccctgcctccacccacgtcccttaatcccgctctatgcagctgctggcagggccttgcaaaaacatacattggtggctcatgcctgtaatcccagcatttgggaggccaaggcgggcggatgccttgagctcaggagttcgagaccagcctggacaacacagggagaccctgtctctacaaaaaattaaaaaaaaaatacattaacatcttgtcaccaacacctgtctcctcctttaacatccacagtggtctcccagagcctggaagtaaagctcaagccccttccccataccccaggaggctctagtccctgtgaagagctctggttccatctcccactaatcttcctccacccattctccatccagatccaatataaccagttcccaccttgagggcctttccctgaatgttcttttcctcaaatcattttcttttaattttttattttatttgagatgggatctcgctttatcacccaggttggagtgcagtggcacgatcatagctcactgcagcctcaacctcctgggctcaagcggtcctcctgcctcagcctcccaaagagctggaatgacaccatgcctagctctcccgaatctttgtatggtcattctttttcatccttcgaggtttagctgcccaactctagtcccagctgcttgggaggctgaggcgggaagatcacttgagcccaggagtttgaggttgcagtgagccaggactgtaccactgcactccagcctgggcaacagagcaagaccctctaaaaagcaataagaacaataaaaaccaagctttagctactttcctctgggaagcctttctgacctgctgtcctcagaactcctcacatccttctcaccctgtccctcactgactcctgtcctagcaggtagcacattctgcatttctgcatcacttggttcaatttttttaccgaccacctctcacaccaacctgtgaaatccacaaaggcaggggccgtgtgcattttattaaccaacgagcccccatcagtcactcaacaaatgctttacccactcccaaggcctcaatcagatctccagacctgggctctgtggccttggggaagttactcaccctctctgggcctgtctggcaggtagaggggcctggctggtgatggatgcctcctcttatccctggcccacgttgtggcagggaggggaggctgcccaggctggcccttcacgtgctgggtacttctgagggcaagcttccacagacagagctccccgagtgtttgctgagttgaacagaaggacctggaaacctcgatgccaacacctccaggaatgagaaggctgcaggggagccagctcaaagctcagggagctaattgcaccattagatgattaaagatgtttaatgacagggatgcagctgtggtgggaagttaagcatggaccacaagcggcccgaggcttggttcaaatttggggtgtgggaaggagcctcccccagatccaaccatctggataggagaggtcacagccacagcctgtggccccaggcggctgaggcctgagccagcactggggctgggctccttccgggctgcctggggatccctgcctccggagtcctccctgagctggcggggccctgagagaaggtgaggccagactcagggtgtgacggggggcagggtggctggctcagttcctgctctggaagccagagctaatgtgctagcctcagacaggggctgagatgggcctggcatggcgccagccgatctggggaatccaggcctgagattcctgtcccaacaagtgttggggcctgttgagcgtcaagcgctggtctgagcaatgccggaacatgatgatgacccagcccaccctctccctgctggagaaacatccactgggaggagtgcagatgggatctacgaagctttgacctgggcttgggggtcaggggagggaccaaagaatggaacaggagttagcaggggattagagacaggaaggacatcccagcagagggcaagcaggagcagggcccactggggagacagcggcagggaagaggggtggtggaggttcagccgttcagccttgcaggcagatgaggtaggactggagaggctggcggggccctggtggcctcttaagtgtgagctttggcctaaggcccctggagagccactgaaggatcagagctgtgatttggaaagaagaacacaaggactgttttttaacattattttatttttttgagttggagtcttgctctgtcacccaggctggagtgcagtggcacgatctcggctcactgcagcctccgcctcctgggttcaagcgattctcctgcctcagcctcctgagtagctgggattacaggtgcacaccaccacgcctggctcattttcttgtatttttggtagagacggggtttcgccatgttggccatgctggtctcgaactcctgacctcaagtgattgacccacctcagcctcccacagtgctgggattacaggcttgaccactgagcttggccacaaggactgttataggatgaattagggaggggcacagctgggatctggatgagccaggccccacctgagtaccagggaggggatgaaaggaggggatagttggagtggaggagggaggccagggatgccaggtttctggtggaagttcttttttgttttttttttagatagggtctccctctgttgtccaggctggagtgcagtagtcatggctcactgcagcctcaacctcgcttgctcaaacaaccctcccacctcggcctcccagggtgctgggattacaggtgtgagccacctcacccgttctctggctgaagttcttgaaagggtgggatcccagaggagggccagtttcagggaacagaagatatgttctgcctgggatgagtggagtctctgggatactgtgtcggggtaggaggacgttctatggaaaggtctggatgatgactggacagatgggtccagagttctggagggaggccagggctggggagggagatctggcatgcagctgggtaggtagtcccttctcgatcctacagcggtgacctccagagcgctccatgtattggcttttctccttccctgcctttcccttcctgcttctttgctccagcttcctggggtcacttctcaaaagagtagtctcgggctctgcttcaggagaacctgaactaagatagagtgaagctgaagccaccagacagtgggctggctcctcttgggctaacactggctgtgtcctcagcccaggcccagtgcaaaggagcctcccttcctcattacccgcttctgccctaccccgggaacgtgtgtggacgtagaaagggtgagtcaaggccaaggggaaggggaaggggaaggggacatcccagaacgtcacgaagaagaactgggcacttcctcctgggggtagcactctttctcatcaatggtgccacgacaggtgcaaaatgcacaacggatgtcacagagcatccccagcaggtgcccccagagggaccagcccagagcgggtgcggaaaggccaagtgcatgaccagccgccttgaggactttggcccccaggaaccttgggctgtggactaggccttgtacttgggcttcccgactagttgggaagcaaagatccgtgtgcttagagggcgctagatggcactttaaaaataactcataggccgggtgcagtggctcacgcctgtaatcctagcactttgggaggccaaagcaggaggatcacttgagcccaggagttcaagaccagcctgggcaacatagggaggccctcgtctttacaaaaaaagttttttttttttttttttttttttttttataattagccgggcatggtggtggtcgcctgtggtcccagctacttgggaggctgaagtggcaggatcacttgagcccagttcaagatcagtgtgggcaagatggtgagaccctatctcttaaaaaaaaaaagaaaaagaaaagaaaagaaagtaggaaggaaggaaagaaaggaaagaaaggaggaagaaaggaagaaaagaaagaaagagaaggaaagaaagaaagaaagagaaaggaaagaaagaaagaaagagagagagaaagaaagaaaggaaggcaagccaggtgtcatggcgctcatctctagtcccagctactctggaggctgaggtgggaggattcctcgagcccaggagtttgaggctgcagtgagttgtgatgatgccactgcactccagcctgggtgacagaatgagacctcctgtgtctaaaaaacacataaatacataaaactaacttaagctattttctattgcctgagcaacattagctcactgtagaaaacttaaaaaatgcccaggcgcagtggctcacacctgtaatcccagcactttgggaggccgaggcgggtggatcacctgaggtcaggagttcgagaccaacctgaccaacatggcaaaaccccatctctattaaaaatacaaaaattagccaggtgtggtggcgcatgtctgtaatcccagctagctgggaggctgaggcaggagaatggcttgaacctgggaggcagaggttgcagtgagccgagatagcgccactgcattccagcctgggtgacaaaagcaaaactgtctcaaaaaaaaaaaaaaaaaaagagagagagaagaaaacgtaaaaaataaagacaagcataaaagaaaaaattattaagctcatcggtgatcccccacccccagggcaactgctagtatcatggaagtgtttattccatttttcctgtgcccacttttttaaaagacagaaatagttacatcattaatgctataatattttaatttactaatatgacatgaactctttccatgtcaaaacatatgaatctttagctgggcgtggtggtgtgcgcctgtagtccccgctattcagaggctgaggtgggaggatctcttgagccccggaggttgaggctgcagcgagtcgtgattgtgccattgcactccagcctaggcaacagaacaagaccttttctcaaaagaactaaaaaagaaaataaaagttatgtggatctacattattaattttaaggccgtcataattatctactttattaatggacttgtccggctgcaccagaaatgataataatatgcattcactgggtatctagcatgtgtgtcattacacagccatatgaggtgtgtacaagtatccccgttttaccaatgagagaagtgagagtcgggggttaatgacctccaaggccacacagctaccgaggcaggattcaaacccaggtctgctcttaaccgtgatgttcagccacccggcaggtccctcccactgacccctatatttgtttctgcaaaaaaattctgatgagtcagagccccgtgtgtgcattttaccagttccacttggagggaaactttatttgcagggcattacattggggcaggaagggttgggggagcagacatcaccatccctccagcctgccccctggacatcgcactgcttcccttagcagctatggaaaccactccgaccagagaggggaagggacttgcccaaggccacactgttcagaggctgcacaggactgcagtcctggcttccgatttcccactggggtgtggatgaagcatgcgggacacacgagacatagggattagaggctccaggtccaaagggcagggacggtgccagtcttggtcactcactgctcacttgtctgtccccagctccagcacaggagctgacatgcaggcctgaatggataaagacgataaggaaggcaagactgggagggatctctgtggaagacttccaggaggggccggggttgggccaaaggggagtggggcttggaccagcagagaggagatggtggtactgcgtgggcaggtgtgtggaggagggaggaaacctggcctgctgaggagagaaatgggtctgggagcaggccagccagccagaggggatgagtctgggcgtggccagagcagaccaaggaggctccaggctccgcctctggggcagccccactcccccaccagccccccgtcccccagccccaccacagagccctgcctgggtaattcctgaacaggaacagaaggaggaagctgtacaagtgacactcagctggtgagtgggaggcagggtttggtttcctttccagatgagccctgggtttgttcagccctggtgcgtgcccccacccctgcccctcccctgctgtctgtggccttggctcaggcactggtgaatctcagaggccaggcaggccagaaaggagccatccaggccaggaaatggggaggtcctgttgcgtgggaatcccctgggagggtggcttgacgtgtccccttctctctcggaccagactgtgagaactgaaagctgggaccgcagctttcacatccttccggtgtggcaaagtcctttccatccttcaggacccaatctattttatttttttactttggagatgggatcttgctttgctgcccaggctgcagtgtagtggcacaatcatggctcactgcagcctcaaactcctgggctcaagtgatcctcctgcctcaacctcctgagtagctggagtacaggcacacctaccatgcctggctaatttttaatcatttttgtagatacggggcctcgctgtgttgcccaggctggtctcaaactcctgggctcaagtgatcctcctgcctcaccctcccaaaatgttgggattacaggcgtgagccattgcacccagcagagactcaatctaaatgtccctcgtttggtaaactctccgagaatcccctatcaaggcaaactgacaaatgctccccacccccgaactcctgtagcactcagaacacacttaaaaataaaaagaatcactgtttattgggtgtccacaatgcacagggtctcacatttcacctccttgttgtacctctcagcatcactgacagttggcaccatccttagttccattttactgagcagctcagtggggcacagggaggttgcagggttgcaggcagtggggctgggtctcctggataccaaagtgtgtcgctctctggccctcctgctcatagtgtttcagggtctgtttcctcttctggcttggagccttcaaagggcagagtctgtgtccctggagacctggccttggggaggtgttgacccatggacaaatctttgaacctccccaccagccttcaccatgatgaggacctaggctggtgccttgtatacagtaggctgttactgaattcttgtgacattgagaaagcttgatcttagtccaggctctgtcataaacttgcagtttgagtttgggcaagtcacttctattctctggtcctaagtttccctgggtttagaaggaaatgtttacagacaagtgtcttaacttcctccctgtccgaaaattcagtcctttgctctagaacatggcacataccccacactcaatttcccttattattattgttatattaagttttttttttctcaagtgggcttgctagggaatccctgattattaatatccatgatagtatagtatgttacaattaacgaaccaatattgatacattattattaactaaagtccatatttgctatggagttccttagtttttccctaatgcctaatgtccccttttttttttttttttttttttgagacagtgtctcgatctgtcacctaggctggagtgcagtggcatgatctcggctcactgcaacctccacctcctgggttccagctattttcctgccttagcctcctgggtagctgggattacaggcatgcaccgccaagcctggctaatttttgtatttttagcagagatggggtttcaccgtattggccaggctgttctcgaactcctgatttcaggtgttccacctgctttggcctcccaaagtgctgggattccaggcatgagccactgcgcctggcacctatgtcctttttctgtcccaggatcatgtctcctcttggctttgatagtttctcggacttttctttttttgatgaccctgacagttttgaggaatactagttaggtgttctgttttttgtttttcgtgttttttttttttgttgttgttgtttgtttgttttttgagatggagtcttgctctgttgccaggccagagtacagtggcgtaatctcagctcattgcaacctccacctcccgggttcaagcaattctcctgcctcagcctctcgagtagctgggactacaggcatgtgccaccacgcccagctaatttttgtatttttagtagagacggcgtttcaccatattggctaggatggtctcgatcgcttgaccttgtgatccgcccgccttggtctcccaaagtgctgggattacaggcatgagccaccttgcctggccttttattttttattttttggatagtgtctaagtctgtcacccaggcttgagtaccgtgacacaatcatagctcactgcagcctccacctcccaggctcaagcgattctcccacctcagcctcctgagtagctgggactacaggcatgtgcccccatgcccagctaattttattaaaaaatttgttttttggtagagatagggtcacaccatgtcacccaggttggtcttgaactcctggcctcaagtgatcctcctgccttggcctcccaaagtgctgggattatagatgtgagccacagtgcctggcctagtctggtgttctgtagaatgccccactattagaatctgtctgaggcttttctcatggctagactggggttccgggttctgaggagaaagaccacagaggtaaaatgccattctaatcacatcatatcaagggcaaatgttatcagcaggcccgatcactgctgatgttgtcctgatcacctggctgagatagcgtttgtaaggttcctgcactgcaaaggcaccgcccccacccctctttccaccctgaactctttagaagggagccaccaagcacagcccacatctagggactggggagtaatgttcctctccttgagggtggagtatagtgtgaatattttttcttctatctacttttcaaagtactcccacaaaacattgctacattgcatcttcccaatgcttaggaaatgtggaggatggaggcattccattgaggtggaggccagtgctcagaggggcagcagtggttccctgcccggcccctgtggatctggccttttgctcttggatgtgaaatatgcgagctttgaggttcacagacccgggtagcacagaaccgcagcacctgagttccagattcaggaaggcttaatttttttttttttttttttttttgagagggagtcttgctctgttgcccaggctggagtgcagtggtgcaatctcagctcactgcaacctctgcctcccgggttcaggaaattctcctgcctcaggctcccgagtagctgggattacaggcacctgccaccacacccagctagtttttgtatttttagtagagatggggtttcactatgttggccaggctggtctcgatctcctgatctcagatgatccacctgcctcggcctcccaaagtgctgggattacaggcgtgagccaccgcacccagccaggaaggcttgaattttgtttgggtttgaattcaaggtcccgcccttcctcaccacgtcatgtcacctcactgagcctcagtttcctcatctgtatggtgggataacaatagctagctcctaccttgttgcgttgtgaagaatgaactagatgctacatccagagtccctggaagcgattccctgctcaggaaactccttgcaccaggactgtgagccatggtgattatttttacaatgattctttcagccctcctgtcgtgaccgtctcctctctgtgcggcaggtttctcaccccctgtggactgtggggtcacagctctagctgcagatttccggctgccctctgccctcccatcaggccaggcagatcaagggcccagcctcctttcatcttttctcacaaacattctgggatgtggcggaaggaggcctgggctggggtgggatggtggctctgcctgccagcaactctctgtgtgaccttgggagaatgcttgtccttctctgggcctcttctgcagcctgaggggagtgaggtgttgagcgtacttggccgtcatgcgagcccagtggggccaggcgtctcccccattttcacatgggcaggtcttttctgcctttgacgtctgtgttttgtctccagattctgggctgggtagagacacacttgagcctgaggttccccatctgtgaaccggccacacagcccagaaggtccggctgtgagggtttgaatgtgtggggctgtgctcagtggttaatgccgtttgaaggtcaccactcaggcgccacctgctcaggtgctgctgtcaccatctcttccctgacgggggcacatttgttatgattaatgaatcaatacaatattgatacattattattatttaaaaaaatttcagaggcagcgtctcactctgttagccaggctggagtgcagtggtaccatcacggctcactgcagccttgacctcctgggctcaagcgatcctcctgcctcagcctcccaagtagctgggatacaggtgcacaccacgcctagctaattttttgttgttgttttttgtggagacaggggtctcactgtatacccaggctaatcttgaactcctagactcaagtgatcctcccacttcagcctcgatgctgggattacaaggcatgagccattgcacctggtctgatacattattataattgaagtccatgctttagtcagacttcctaagtctttccctaatgtcttttttctgccccaggatcatgtctcctctttgctctgatagtttttcagatttttcttttctgcctttgacacccatgttttggacgcccctcccggtgctggccgctgggggagaacaagctcatctgctcctggctcctgactcccatggggttggggatgcttctctagtgtcttgggtttcccaccttcggccagtttggcctcacttcctggaacacggatatatgcccatgcacacactcctgtgtgagccaggccttctgcatcagctgggtccccgctgctcctcagcacagaggcctcctgactgccccctccctgtcccctaatgtgaccgccactccatgtctccccaggccctgctctgctcaccaccctccgtggctcccaccacctccaggacagaagccacgcctggcactcagggatcctcaggttcccctaccacccttcccacctcacttccccgactccagcccaaccgccatgctgtgcttcgcaaacaccacctgcttctgcatggagttgcagacgcagcggcgttccccatctctgtctttgctcacactgtccctctacctgcacacctgtcctgtcctgtttgttattataattatcttgttttttgagacagggtcttgctctgtcacccaggctagagtgcagtggtacgatcatggctcactgcagcctcgatctcctgggttcaagttatcttcccagctcagccttcccagtacctgggaccacaggtgcacaccaccacatctggctaatttttagttttttttttttttttttgtagagacagggcctcactatattgcccagactggtctcaaactcctggactcaagtgatcctcctgcttcagcctcccaaagtgttgggattataggcgtgacccaccatgccctgcctccctgtcccattttcacctggcaaccatctccccaggcttctaaactctccatagacaactctctcctcaacacacatgctgggttgggggccccactctgggccctgcagcccctgtacttgcccatccctgactcctctaagttagagaccaaagaccagccttggttttttcactgctgtatcccagcatgtagcacagaccctagcacatagtagatgctcaataaatgaccactgcaggaggaaggaagagtgaagccaagccaaggactagggggtggggaaccttctgggcagagggatcagcaagtgcaaaggcctcaggacagggactgcttgtggagggacagcaggaggcaggtagaggaggggaggagaccagggcctgcacagcacgacatctctgtgtaaactgtgaagtgcagtgccaggggaggtgccaagcccattccacagactcaggctagagcccatcccccacccaccctgtcctgtagccctgagcctggtggcttcaactagaccactcacagcacaccatgtggagaatggcagaactgttctggagtttcccactgaggcctgtgatgggtccagtttcctggctgctgcagcaagggtgagctgggctggggctgggcatagcagatcagccatcattgagccagggtcaccagggcactaggtgtgctgtgggcagcacctctgatcccatgtcatgggacaactctggctcgtgggttcactgccagtcgtggagggccaggcctcaccctaccccctccaccctgccctcagttgtggctttggcccacccaggttgagggaaggagggaagaggaggtttctggagacagaggactatacaaccagcactcaccatctcagcaatgttgacgtcaatagcatctatcatctgctgggtgcttttgggttgggaagtggttcctgttggtgttctaagactggcctggggccatatatacagttggtagtcaataaatgcttgctgtccattaacgatgatttgcaggaattaagcaatgagttgctgctttaccaacaaagaatgttttaagcaaaataatttgcacaaagagtcacttatctaccaggccagaccagcaactcccaactgcacaatcctggaacttgccagggttgttaccctcgttttactgatgagtaaactgaggcccagagaaggcaggttcacatagtcactgaagggaagagctggaacttgaactcttgtctgtaggtcccaagtcagtgtgtgctgcctggccaactgggcagtgcctgctccgtgctgggcatgggccaggccttggtcactgccctcagggtggggacagacacactcagaacggacttagcacgtgcctccatcagggcgtgtcaggaagcatgttgtggagaaggtggcgtttactctggactttgaagaacaaggcgaggtagccagggacaggggctgagccttcctggcaggggttacagcctagcaaaagcccagaggggtagttaaaaataaagagtgcttcaaacgctcaataatggaaccattgtgctggccacatcctcctgagaacctcagccgctgagccaggcccttgaagtcggcagtggcttcaggtgggaagctgcatctgtgcttgcagaacctttacttgtctaagttgcctcctctctgataagagcatgtagggtatgaatgagaaagagatttcacatgtgctgagcgggcatcacctcatttcatccttacatgcgtcttctgggggctgtgatatctttagcccactctgcaggttggcatactgaggcttcttacattatctgcaaagtggcagagttgagacttgaacctgggtctggtccaaaatctgtgcttttaagctctctgtcatcccagttctcgaaaagcccagaattttctgttgaactcctggggatgagtttagtgatgtgctcgtacatattgaataaccagctctctggaagaaaaaagaggcttgattggtagcgtattccgatgtccaaggggtaaatactcccactgtggctgacatggagctatcagtgtgacattcttgaatatggagttgggaagagatgagcacagttggttcttgcaagtaggtaagggccagctccagcgtgtcactgggtaaatgtccctgcctcccccccgagcccagtatggccagtaaaggcctttagacatgtctaaggaatggaagagggctgagaaacctgctcctccagctgggggcccgccctgagccctgggaagctgcggttaatctttaagccagccttgcaaacaagtgcggccatttcaccagcccaggctggcttctgctgttgactggctgtggcacctcaagcagcccctttcccctctagcctcagtttatcaccgcaagagctaccattcatctagcacaacctgaccatcctcacactggtcagttccaaccttcccaggaatcttctgtggccatgttcactccggttttacaggtgagggggctgggctgggaagctgatcgacttgtccaccccacagcagaggggcagctagcctagatgcgaacctagatcagtgtagagtaaggctttgctcattcctggtctcctggaaggtatgttgtacccagaggcctttgccttccacattctagggtgctcctcccagctcctctcagcagggacctttgcccagggaatagaagcctgacctgtctgggccttaatttcccatctgtgaaatgggagaactttcaaagaaggaatatggaggcaggtgtgatatttaaagctggacccaggcccacctttccctgtgctaggattccaggacaggtaaggagccaagggtggggtgcccagccccaaaaggatagccctggagcctgcgccagggggtaagaggggagtctttgtggcctaaagcagcatttcctcaatgtcccgtttttctgctacatttcctgccctggttcagaggtacttagcctctttacttacttggaagtgtgactgccactcagatgccctggtcagcccctcctaagcagtaataattagaactaggggacttccgatgggctgccagggatgttttgcccttatgcacttaaaatgaacccgtaactattaaaataaatgtcgctcctccccaccctgtccctcctgccccagcccctactttgagaaactcaggtcaaggctaaagtccaaggcctggttcttgtcagtgcctcagtttccccatctgtaaagtggggcgatcttccgccgctcaggccaggtggtggttaggattaaaccctgaagtcgacctgagcagcttagcatggcgcctggcccagagcgggcgctccacgcccgctgatattattaccaatcgtgatttcgggagaggcggatctggggcgtagaaggtgggtgggttggggagggcattttggcctgggggcggatggggcccgcggggtgcggcgccctggcggagtgggaggcggggcttctgtgcccggtgtccccaccccgcccggacccccagctcgggccgcccctgggtctctcccgggtcaccggcggggaatccgtccccgcgcgcttcctccttcctcctcctcccggctgcctgccgggcccctcctcccagctcgcgcgctccctccctcctcttcccctccccgggccgccgccgcctcctcctcctcctcctccctttctctctcgatctgtctctcccggcccggaatccattccggcctgggagccggagcggccaggccgccgtctgcccgtcccgctggacgtcccgcggtccgccctcccgtgcgtccgtctgccggtgagcccgcccgcccgccggcccaggtgagcgccccccgcccctccgcggaccccccgccccggccagcgcgggggagcccccgccccggaccaccctggcgtcggatcgcgggccggcggggactcctgtccacccccccaattcccaccccccctccgggccaagccgcgatacccaagcgccgggcgggcgcacggggccatgcccggcgcggccttttgttgtgatgcagcggggggagggggctgggcggggggggcgcagggttcctggctgcgtggggaccccctccagctcatgctccccataggatcccccagagaagccagcgagctgggccctagcccccgggccaggtctaggccaaatctgaaatctgagccagtcggcgccgcctctgcctgggctgcccggccctgcgccccccggccccgggtgggaggtggggggatcggcagggcgggctgaggggccccggggtcagggcgccaggccgaactgccaggacctccctgccctcgtggggcctcgggtagggcctggtgctgccggcctggaagggactgggccagactgcgtttggtctcccctgcccacagcccccagcctcgcccctgagcaggcccagctaccagccggctcagaagttggcaaaagttttgggggttggccaccgggccaggtccacctgtctgcctgggctgggattggggtgggtttgagtccccaccagggctgccacttgccctgctgtgtgtcctcagacaactgcctgcctctctgagctgggttcctcattggtggcaggtgggcctggctggaattgctaggctggtggaaggatggggtgaacagaaggggctcacctgtgtggtatcctttcagcccctgcgtccttcaggtggacttaggagtggacagagcctgtgtgtgcccctgggcaagacctcctgaacttcatggactctgtacaatttggggcagtggttgctgggtcacctggggtaagtccaggcccagccacagccacagtgcagctgggatcagacttggtttcaagggtgggccaggctggtcctgttgcagaccctcttctcagccccctggctgggggatcaaggcaccgagtcttcttgtctcacccagtgacctgggccaagagactgcccctctaagtccctatacgtgaaatgagaatcctcaggcgaagattctaagcgcttctgcaggtagaggcttggcgtgtagtagatgctcaataaatgaattgttcactggacacattggctgagaaagatgggtgagatgtgaggttgctggctagttcattctagaagaggatgggttggtgccttgagaaagaaatagccctggcaccgtcctgccagccagcagctgggtgaccgtaagcaattcacttttcccttctggcctcagttttgccacatataaaactgggccagtggtaatgacagctgccaacatctactgaacaccttttaggaggtacagactcttgtttatcttcattttgctgatggggaaactgaggctaagagaggggaagtgacttgaccaaggccctatagttggaagctggaatgaaagcccagacctcagagaccacagtctggctgtccctgcatccctccagtgatggggcagtggaggttcgcaagacaggactgcacacacagcagtgtcggaaaagactgctctgctgagggattgaatgaaagccacgaggcctttttggtgatgtggtgatgtggtctttccacccaaggaaatgatttacagtgtgtcacctctctcagctgactgcctgcctaggccctcccgcgtgcccctgggcctttgctcctaaactgtgtccctcccagagtgccctctcctccaggtgctgcttatctgcccttgccccgccaggcttagcttaggcccctctcttctaggaggaaggcccgtggctctctctccctgtcccctagctcttgttggagcatgacttatccacagctcagcctggttcctgcttttgcttctctgattgtgaccaggggggtggggtggagggatgtctggctcccccaagccccaggaaccagagaggagatggctcagtgacctgttgagggaccttctgcccatctccgtggtcctcagctgaccccattttctcaaacctccccatgtataagcatttgtgacccctgtattgagcacctgctgcgtaccaggaacttggaactcgggctgagcagtattgtgctggggttagcagggagtgggagctgtgggagtcatggaggcttctagaaggtggcagggcctgagctgaggacgagcaagagttcacttggcaaagaaggggagagggagctcttttttcccttcccaggggccctgaggtggtggggtgtggtcagcctggttggatacttgctggggagctgggaacaggtccttggcctcccagaagtttgaatctggagggtgagcaaagttgcaaacaagttgccagttgagttactatataatcacagatatgataaggactcagggagagaggcctagggtacacaggaatcttgaagagggcatgtaggggttgaccaggcatggagttagggaaagggcttgccaggcagcaggaagtgcatgtgcaaaggccctgaggtatgtgccaagacgtgctgtcatggagaatcagtgggggaagctgtgaggctggagcgtgcacaatgaaggggagtgggtaagaggtagaatgagggggtgtatcagcagggctggaccatgctggggccttgtgggccctggggaggagtttggccttcattgtcacacagggggctgatcggtgtcccctgtgtgaacagccccaagctggaggccagaggtacagagctgaccaatagaaatagatctgatgatagacctagatctgtaggctggactccaaaattttatggaggcctagatcaggtctcaagaggagcgggtatttgaggctgggctttggaagtggagtaggagttcactagcagcaaggctggagaggatgagagccgggggtgtgggaagtgcaatgctgggtggctggaagctgggagtgaggtagggagcagggaggggtcagcccgagagatggggaccaaaggtttggtaagggcttaagagtcagacaggcctgggtttatgttctgaccgtcccacttgctgtgtgtctttggatcatttactgtatcttttgagagacttagtttctttgtcatgaaaatggggacaacagatacctccttgttggattagggttaaaggagggctgtgtgcccagtgtctggcaccggtaggtacttggcaaatgggacctgctttgcgctgttgcattggacaggtcactcggcctctctgggtctggccctgctagctctgtggtcaagcccttgcctgggtgatctcatggagtctgaaggtgccggttggggcagggctggctcgggagaggatgttggcagccaaggccgccaatgtgcagggtgactttgagtcctgccctgccctctctttgccttctctgtgtatgaagaggctaaactggggagaatgccatgcgtctagccccagccccgcttcttcgaagcctgccttcggtgtgattggtcccattttccggttgtaagtactaagacccaggaagggaaagccacttgcctagggtctcccagttgccaagtgacagggccaggccttggctgtaggctctggactcctagtccagcagagccactgaaaaaggccaccacttccctgctctgggccttttgccggagcttcatttcctgcctcggtgtgtgtccccacatctctatctcccttcggattcccacaaccctttccttcccctccatggcccccaccccttatctccgtgggaaacccctctggcttccccttgagctcctgggggccacttcctctggggagcctcagtttcttcatgcctgaagtaggatagtgagtcatggttcccaggatgtcccaagaggacagaaataaagtgcttagcacacattagggactcaatcagtggaggcgggggagggccaggcacctgctcaagtcctgcctcctctggcagctgatgccctgtcctgtgattcagtttctgaagctgtgaaatgggcctagggcttgtacctggtaaggctaacaagaggatggtatgaggctgtaccttaggtccccacctggtggctggctccgtgtcgctgttcctgggggagggagacccagtagaggcctcccctgtgttcaaggcctcattccctgctgtttgtccaaagccaagtcacttagtctctctaaacctcagcctctgcacacctcccttgtgaggattaaatcagctaatgtattccccgtggctcaaatctactgggtgcttagaaaattttatatttttctttccccattctcctccctgttggggactcagatattatctagtttagggaagcttctgggctttcatccccctggcctagagtgctgtgttgagaagcattctgaggctcagtgttggcttcatgggaaagagtgctgtgatagattagtcatgtctgccatgggcacaggataagagagtattgtatgtgtgccatgagtttgtcattcttgatctattctgaccttctcctttcacagatcggggggattgaggctagaaagacccagggcaaatcatctacgctgggagaaaaatgcagagctcttgtcttcgatccaggactctccccagccagccagcctcctccttcccacagtacagcctggtaaggctgagtcagggatagatgaccggggaggatctcagagctgggagccagacctccatctccctactccttgctctgggtccttgggcaagtgactttcccccaactttggtccatttggtccttcttctcccttagaactacccagagaagttccagagtaaaaggagaagccagaagggaggagaagttgaatgatcttggccaaatcccttcctgtctggtcctcagtttcctcatctgtatggtgaggactcctcccactgaggctctgtgatggtgatcctagctggggagtgctccaggggcaggcccagcggagtcttttttggtgctcatgtaggggtggggatgtctgtggtgggtgggtggtgatatttgtggacccactgagaaactttaggaacgggttcttttgaacccttggacctgctgggctatgaggctggcacaggcagaatccagttgctgggagtggaaattgagctggagtggcctggggaagcatggcctccctgttggggtctgattagcttctcttaggctgctttgcccaaattcatggccttgacttttaccttgtctgatgtcgatatcttcatgtcatgcccttctgagctgggtcataataaggtgacccattgtgtcccttgctccatcctgggagcagtcaaactcttattcctgttacacagaagaggagactgaagctcagagaggctaagagctggggccacaggagtgcagcaaagtgaggtgtgagcccagacttctggctgctgagtaatttgtggggatctgattcttattaagtgtgtacccaacgtggctaaaacttttcccaggtataggaggggtgcggtgctgggggcaggtgaccctgactctctgggttccagctctggctgatggattccccagtcggacgtggagtactgggatcttgggtgctcacggatgcttatgccataaagggtaatggaagtagcaaagcctttgaagccagttggttctgggttcaaatcgtggcttggccacttgtttgctgtgtatgattgtacagcttagaacctcagtttccccatctgtgaaatggggatgacgaggctggcaccagctttgacaagatggcatgaagatccgatgagccaatgtgtgccaagtgcttgggcgcagggcctgcactcaggaagtgcatgatatttatgagtgcctgttagaaaggtgattccctgatgaggcaggaatcctgggcctctgcaggccaactgatccggaaatcaccagggcagtgaccagccacctttgtctgtggttggcttgttctgtggggaagggagtggggggaagattaactagaaacagacaagcttggtgactggattgattggaagccaccagctccatccagcctccctgagcctggcttctgccttagcccttgcctgcctgtgacctagcatagcctcccagtgccccgatgcctcaccctggcctccctcctccgcctcactgaatgggcccctctcttcaaaggtggattctatttgagcatccttgcccgtttgacctgagaggtgagagctgttcctgctcttgttttttgggaggcagctgaagctcagagagaggcggggatgggctcgggctgcacagcaagggcccctagaggtgccctgccccgatcatctcccatattttcgagccgtagctatcttcctgcctgaccggggttatcgggccgtacacctttgcccctgcagctcccactgcctggtgtgccctccctctcagtgcccctccagtggctgagatgcttctggcttcagaaggcctttgtgaacaccctgccggtcccactgagtccatgagtccgtactgaccccacatccaccattgaacttcaccttgtcccttctttgcccttcctcatggctctgacacattctgccttagatgacaagtcataggattctttttgcctctaagggaatatggtaatcaccatattcccaagggcacagccctttacagtttacaaagaactttccgcagttacctctgtgcatccccagcaccagcggggctgagacagacagaaccaccgtaataaactttgtgtggcagatgaggaaactgtgacctcaaatcagggtcatgccaggtgctctctctgcttgggcaaatggaactggactctttccccactgagcccgtctcctcagtctgggacccctctcccagagctctgtgaatagcatgacttattgtcaaaaggaggatttggaggttcagagaggtaaagtgacttgcctgaggtcacgcagccctgaagggacttggagggttccttctaaaaatcagagaagaggcagattgggccagttttcctcccacttctgaagggaggaccagacacgcccgggaccctgaaggagcaatgagccaccgtgagcccttgcggtcccttcagccagcgttcattcctccagcacggagttgagcccttctgcagtgccaggcaaatggttgtctcatgctcacagcagcctcgcggggtagtggtcccggccccatttcaccaaagaggaagctcaggagccaggggacttgcccaaggtcatccagtgcatggatttgaacccagggcttcctgggcatgccaggcctgccccgcctcatctgggctgagcccttctctacttccacagacccttgatcagccctccagccctccccacagttcctcactgggcagcgtgaagacagggagacttctcctctacccccaactgctgtcacccactagctgtgtggctttggtgagtcagtttaacctctctgtgcctcagtttccccatctgaaaaatgagcctagtggtagaacccactccatgggcttgttgcaaggatgaagtcttgtgtccaacgccctcagcaatgccagcacacagtaagtgctcggtgcgtgttattttattgcaatttgtattaacctggggaagaagggaaagaccaccccgttatccagatgggaaaatggagagaaaggaaatagcatccgccaggtcacaatgtgatgtcacagccagaagtctcctggggcgcattctgctttccagatggggaaactgaggcctagaacctgagaagggactcaatcaaggtcctaatttcttgcctttagtttgggttgaagcctccttgtccacctgcttgccctgggactatgggtcagttgcttcccctcgctgaggctcagtttctttatctgggaaatgagggtaacaagtgtgcacccggtggggctggggtggggactgggtacggtcatctccataaagcatttagttcaaggcctggcctggaggcagcactcaacagctgcagggacggacttccaggactcaattttctcatctgtgccatgctctgtgcatgtcgttggggagacagttccatcttatcccgccagtgtgtctcctcagtctcttagaagccaccctaggcaggggcaggggcaggggccggggaggtgaggtctggcttcttattctgcctgggaggccagggctgtgccttgtggactttgtccctgagttgtgccaagtcctcaaggctgggcctggttgggagactgcaccaatccccaccaggccttctgggtgccctgtggttgccagcacccagatcctgccacatcactgcgtctgcctgcctttgctgccgcgtgccccgggtggtggcttctctttctgagccttggttttcccacctatgagaaggggtaaggagtcttcctcaccgggctgttgggaaggcttgatgtgctcattctccccatgccaggcttatagaaagtgtcactgttaatgggtacggctgtgaggacgggtaggatcctgactggcaggaggggcgagcagcatcctgggtagaggatacacgtgagcacaggcttggaggtggcacagtttggggagcaccctgtagccaggtgggtgaagtgggagaggaccccataatgtggggatttggactggcgctgggtgaagtgggcaggatctcagcgccaactgtggtgattttgggtgatgctgactcccctgccctctaaactttagatttgtgtttgaagcctcgggagcagcctcctgccctccccacccccaccccgccaggtgttcccgaaggccccggaaccagatgagacatagttctatttggggacaatactgctgttcccgtttctctcctgtgccctagttttagaaacggagtgggtttggttaccagttggccatttgcagcgagctcccccctccgcccactccacccataccttagagctgtgggcatcgcgggcaaaataggactcagtgctgccactgggagtggctcctgggctctgcccctgggttctctgggtagggagttggcagctggactctctgttatccaccggtgatatctgggccttgtgatgggtgctgggaaccctgaggatgtacttgggacatagcttatattctgggggagccagagagactccagtcatttccctatggcacgatggggtaggggccatatgaactatggcaacccagcacaatgccaggagagcttcccggaggaggtgatacctggcctggatcttaaaggatgagcaggagctcatgagaaaaaaaagaagggtgagggtgggccgggaagaagggaccgtgtgcaaaaatgtctgggggtaggaagtagccaggcggtgtggatagccatggaggtggggagcagcaggccaggtacaagggggttagaaggtggcttggctgatcaggcagagcctcaaaccctcacagggcactcaggcttgggcctgggggtgatgagagcagagcaggttgaggccagactcttgctgcaggtgtggaggacagagaaggatcagaccggcctcagaggctcaattacttttgccaagtaaaggcagcccacagggttcaagacagggatctaaaacctctccctggggcaaaaggtaggggctgacctggggccttggagggagtgggtcagggaagacttcctgggggaggaggtaccctgacttaccggaaggatgggagggacctctgaggggagatagagcttgacaaagggcctgaaggtgccctgtgagcagctcctcttggaggtctgaggagccatggagtcttgacttgggtcagttggctggtgccaatgggtagagggcctgggggcctgctcctcgggcagtgaggaagggctactggatgagagtaatgtatcccacattctgggtagtgtctgggtcagggtcagtgtggcttcagtgaggtggccctggtggccgcactgagaacagatgggcctggagagaagcaggcactggcaggggaaatggccaggtctgggatggacaggggagtggtggggggcagggtggggagcttctgcccctgggtccttctgcctgtccatcctttcctcgaagacgcctgcctggcaggaagtggtggagacgtgttgcagcccaactggcagattcccaaggcgcctggggcattgggcaagggctctggggttagggcccggcctcccttcctttttgggtaaacctcaccagggcaaagctccccgacgtgggtgaagggctaggcctgattgcctccataaagaccccctctgccctcttgaacctggagggtctggactctagacagggggagttgagagccgtggctgttggcactggtgccagatgggcctggattagaatccaggctttgttacctgctggctggcagaccttggcctttgagagcctcagtttccccatccgcaaaaatgggggtcacactagagcttccctcctacggctcctgagagagtgaaatgatattgtgaagagctgtgccagcactctgcccgcctcgtgggtctgtgtctagagctgttgccccagccggctcggggactgagacttgctgggctgtggggggcggcttccggtctaccctgggctctcagcacagaggacaaagcccctttgtggagggcggatggagcttgagagcccctgtccttggggagcaggggactgcttgccccttctcttcactcagttcccctggggagaaggagcttcctcagacacagagggtgggaaacgaaagtcgggctgtgcaggaggacaggctgggctggctacagctgccctggccaacatctggctgtgagctcggatgggcccttctcttctctgggccaccttctcaggcaagtcccaggcctactgtgggtgccctgcttgctcttccatccatccatccatccatccatccatgatcaggtactcactccatgctaggctgtgtgcctttggccagtgtctgttctgacccactggtacccaagcatcccagctgttcattgttttgaatattacacctgctgcagagtattaaattatagggaagacagaagtggcccccgtccccgtgagacaggttctcacacagtgagttatgtcatcagagctgtggtcggtccatgctaggaagcagaagttgaagatcctcacttggactggggtttgagggaggctttctgtgaggaagtggctttggagctgagacttggagagcagagttggctgggtgtatcaagaaacaggtggtcgagcaaggcctgtctgagcagatggctgagtcctgaagacctgaaggaggcaagggagtgagggtgtaggtgagggtggagtgtgctgccagtgcaggaacagcaggtgcaaaggccctgaggcaggagtgtgctggcttttcagggaaggggcaggcggctggtgtggatggagtagagcgaggggagggatggggttggtggaggccactgagggccttggaggcccctgtgacgactttggcctttgtgtcaggagtgtgggttctgtgggtggtattaagcaggaacgaagggttcaaactgacatttcagaagggttccctgctctgtattagccagcctgagaggaggaggctgggcacagtaacggtccctaccccacagtgctggcaggaggagccgatgagactgagtgtgaagtgccgaactgatgtcctgcatacgccatgtgttcagtagttagtaaggattttgatcgctgttgtttttgtggggagtaagggcatgtgtgtgggcccgggctctggccgtggtcaccccagagctgggctttgggaaggggctggagggctgagtggcccctttcaggtaactcagcaccttgggattcacagtcctggaatccatacccaacaccactttccacacagggaaactgagtccagaagggctcgtggattcactcaagtctccccagcaccttgggacagatcagggtttccgtaccgggtggtctctgcacagcccagggctcacctctccttgccctcttcaggcgccacccacttccaggcagtacgcttccttggagggcttccaggccctgcacaggtcccattgggaagggatccagtcccctacagtgcaggccagggattggggtctgatagaggccccttttctgcctgggaggaagcagaagagcggtcagggctgggacagttgtgctctccagggcgtgagtttggtaggagctccgtggcccccctgctgggcttctgccctttctgggctgcaggccccgtccccagtgcacccctccatgtctgccggtgtccgccccggcctgccgtctccaccccagccccactggcagagccggtttgagtctactgtccctgagcatgttcgcgccgcggacacgggaccaggcatgtcctggctgccctggcacgcgcacggccccttgctcactcttcactcactctttgctcactcagcaaacatcctctgggacctcagttcctggcctgggccatgctgggtggggatcagggcctggagttgtctcagacttgcttctgccctgtgtaagccagggtgggcagaagctctgccgcagagatggaccaggcaggtggcaggagggcacagtggtggggcataggctgtgggactggacagatctggggccgagggctgccacctcttattcctgtggggccctaggtggggcccatccgtcggtctatccatcccacaaatattttctgtgctcaacaatgttctagagctgcagatagcaaggaaccaaccaaagatccctgcttttgcaaagctcacattctagagggggagacagaagaacacaacaaataaggaaactgcacacacagcccgtaagaaggcggtaagggccacgaatccataatgcagggaagcgggtgggcctgctggtgggctcgtggaggatgggtcgcaattagatggtggccagggaaggcttcacacctcaaagaagctcacaacaaaggaggggagggaggagccatgcagctccctggggagggaacagccagtggggagaccccgaggcaggggagagcctggagtgctggtggaactggagggggccaggggaacagagtgagaaaggggaagaacaggggaagaatggagagaggagggcggatcagggagggcacctgagccatctaaaacgcaggctttggacttggagcgagatggggtcacacgagggtcctgggtgcacctggctgctgtgtgaagagcagactgggggctgagggtggaggtgggtggaccagtgaggtggctgctgccttagtctagggggtggcggttcgctcagtctgggcgtagttattgggagggtcaaagggccaagcattttttttttctttgcatcatttaagttaatcttgcttttcccactctattctggaggcatgttcatagaatgaaccccatgaacccatcgctgagccaagcaccactacccatggccagtcctgcctcctccacacctgttctatcccatcctatcttgtgtcattttagagcaaatgacaggcatcttatttcacgtgtgaaatatttcagtgtgtatctctaaaagacaaggactcttgtgtttaaaaagtagccataaaactaaagtccatgtaaaaaatgtgaacaatttctttctctttctctctctctcttttttttttttttttttttggtgagacagggtctcactctgtcacccaggctggagtgcagtggtgcaattacagctcactgcagcctcaagctcctgggcttgagcgatccttccacctcagcctcctgagtagctgggactacaggcgcataccaccccacctggctagtttttaaaatttttaatttgtagtgatgaggtctctctatgttaccaagactggtcattcctgagtcaattcctgactcaagtgatcctcctgcctctgcctcccaaagtgctggattacaggcgtgagccaccatctaatggcctaacttcttaatatcagcaaaaatcccctcctctcccagatatattttgatggtgcaactgatgtctctggacttccccctccttgccataaagcgaggttcataatagcccccgctgtcatgctattgtgagatcattcaagtaggatgcctagcataggcccggcacatagtaggtgctcaacaaagaatagctgctcctactcttttgactgatagcaaacacttagggcacacttgctagggtctgggtccagtcctgtgtgcttcacagatataaacttatttaatcctcacaacagtcctttgaggtagatgatgtgtatcactatttgacaggagaggcagtggaggcacagagaggtggagtaactttcccaaggtcacacagcaaggaagggccagagctaggttttgaatcctggtagtctagctcttaatccctatgtggtggaggctacattagcccagaaaagggtggcggtccctctctcagcttgtgggggggcaggcaaggtcaggtactgcctgtggtcaggccgaaagggtacactgtagttcatggtggggcagtgaaaggggaggtgggtggtggagcttagggggggaagaatatgtgcaaaggcttggaagctagagggtagttacgagtttaagggagggtcaagggatgggagcttgcggcaggccccctccatccaagtttggccttggtcctgtgatcaccaggctggagtgtcgatcgtttttatcatcttacgatcacccgtccccagcctgtctcggatgccctctcctccctctgatacctgccagagacccatttcatggatgagtaaaggcaggctgaccttcctgtgaccacacagccaggggcaggccacctgcaggcttgaacggggccagggggtgggtttggggctcaggctgggccgtgtggagggccctggccactaggcgctcctgcccaccagtgtccctggagggagatactgcatgggtgtgggcggggaggagggggcactgtgtgttcccaaagcagctggcagggaacagtgggtgccatgggcaggggccggctggcggccatctccacaaggcacatcagccatcacccatcaggggtggggcagctgggggctctcggaaagatgacctacggctgggagagagcaaaacttgccacctcagtgttctctgtgatcctctcctgacactgagcaggggcagggcaggagtgctgctgagggcctctgtgtgcaggtagagatgccggggtctctgtgtgcaggtagagatgtagagatgccggggtctctgtgtgcaggtagagatgtagagatgccggggtctctgtgtgcaggtagagatgccggggtctctgtgtgcaggtagagatgccggggtctctgtgtgcaggtagagatgtagagatgctggggtctctgtgtgcaggtagagatgctggggtctctgtgtgcaggcagagatgctgaagcccaggttagctcttatttatgtctttatttatttttttgagacaaggtctcactctgttgcccaggctggagtgcagtggtgtaatcatagctcactgcagcctcaaactcctgggtgcaagcaatcctcccacctcggcttcctgagtagctggaactcttgggcaccaccatgaccggttacattttttttctattttttttttgtagcgatgggggtctcactttgttgcccaggctggtctcaaactcttggcctcaagcgatcctcccatcttggcctcctgagtcactgggattacaggtgcaagccactgctcctggccgcacagtgattctcatggaagccttccattcagccacgtggtggttagccctcagcaggctgggccccaaggttctgtctcctcttccagtttctcctcagctcagtgctctggggcctggtgccccaagaatcttatcctcagtgccattgcccccagcccacaccctcattccagggcaggccttggtcttgctgtgtgaccaaggcccggcagcccccttctctgagccttagcctcctcagctgccaaggagaagggcccacgaaagctcctgggggttgaggctgtgaccccctggccttgtgagctgccctacccaccccgttacggggcggcctggtgacagactctgggatggttcctggggtggggtgggggggtctgcgaagcctcctaacccctccaactcaccagtccctagatgctgtctccttctcagtgacctcactccagggtgtgggggctcggaggagggagagatggtgggaagtgggtatagggaagagagcgccaccctggtgtgccagtctttcccccattttgccgctgaggaaactgaggctgcaggactgaaattgacatagctccctcgcctttctctaagcggtcccagctgcaggccctgtcaaagccatcccacctgcctggatcacactccccaccctctcttcacaaaccgcctagcctttgggcctcagctgagataccccctcctctgggaaggccaccatggtttaggtgtctcctcttgcccctctggccctttggagctggagatgacggtccctgacaagacactgtgggaagggccactgttctctgaccgccggctcccaggggcctgagaaaagcttcctggccctgctctcagttttgcaggccttcgtgacttgcattgaacatatccctctcagggtcttccccgggccccctcgtgcctaggccaagggccagcagtgacccagttataccggaacacactctggccagacctcgctctgaacaaggccctgcccacctggcaccctggtccgcctgcgcctctgcacccaggctccctcctgggtcgcccttgctgtgctcctcacaggggaggtggggtaggatgggctctggtgtccctcggatctggctggtatcctggctgtctgccttctggctggggcagcctcctggggcccctgtggccttgtatgtaaaacgagtgtggccacagcttgctacagggctgctgggaacattggaggggagcgtgaaccccgggcgggaggatgtgaaggggagaagtgtgggtttctgcacccccatcagcacaccccattccacccccgcctggaccagagcagctggtgacattgggttttgccaagaggagcccaggctccttccttgggcggttcccaggggctctgggtggccgtcccggttagggagacatgcagagcgttagggattgtcactcggctgctaagagttgggatctcaggcacgccatttaacctgtctgtgcttcagtttcctcatctgtgcgatggtgtgatgagcgtggtgcatggcaggtgcctgacaagtccttcggctctcccatcagggagaggatggctgctaatgggccaagtccctgcccaccgccttccccctccatccccgcacaggcctgatactacacccaccactgctcttccctgccccgcctcccacctctcccctgccattggggtactgttatcaggaggcattccaggactggctgagaacagcttccaccctgggcccttctgagaggatgcgatcactgatagatgccctgccggggcctcctttgaggaatgggctctggggtacgagacggtggaacccagatagtctgggtttgcctcctggtgctgtgtcttatgagctgtgtgacatcaggcaagcagccccgcctctctgtgcttcagtttcctcatctgcaaatcagagcccaccacagagggttggggtggttcactgagctcgtaagcatggtgcccgccacccaggagcaccgtgatggtgacgccgtagctgttgttatcctctgaggaccaactgtccctcctccttgtggggcccctggtttatttggcctctgtgtccaccccgtgatgagggcgtggcaggaggacccctctggactttctcttctccaggtctaggggacaaggagagggtggagctgagagaggctatgttcagaaattgggaacctgctgtgtgatcttggatggcccctctccctttctgagcctccatttcctggcctgctctatgagcacgtggacctggcccctcgttatccttgtcacgatactttcagtagttcctccctcggccagcccagccacatggcttttgactgtttttcccactacggcatctggggcgcagtaggtgctcagctaaatcttgttggagaagcccaggagtgcaccactgagtggctgtcccgggctttcccactcccggcctcttgcttgtgtagccccctttgccaagaatgtggcccccattcatctctacttgtggaaatccttgtcctcgaagcccttcgcaaatgctgcctcccctaggaagcctttcccagtttctcccagccagaggagatgctggtccttggaacacttgctctgaggctctctggtggtccctgttacagtgcactgccgtgtccatagtaacagatgaatggcaaacagggactgtgcacttgctaggagccaggcacagggggaggccctgagcttgtgctgtcttatttcatcttccacaccaacctcacaaggtggatattaatcctattgtccctccctttacagaacagagaacagaagctcagagaagtgaagcaacttgcccagctatgagagacagagccaggatttgaaaccaggtaagcctgtgttttttcttaaaaaggaaagaaaagacatcaacacacacacacacacacacacacacacacacacacacacacacacacacacgacagggaaaagtaagcctctctcacacccaggtctccttgccagaggcaaccacttgaaaaaatttctggtgtatccttccagggagatccaagcatatataagcatgtatattaacaatttttttagcataatgtgaatttcaataatgatgggaatgccaggtgttgatatttttagcttctgcacttgactcaatattacatatttgcaaagaattttttttttttcttagacagggtcttactctgttgcccaggctgtagtgcagtgtcacaatcatgctcaccgtagcttcgaaatcctgggctcaaacgatcctcccacctcagtgtcccaaggagctgggactgcaggcacatgcaccacacccagccagttatttatttttttgtagagacagagtctcactatgttgcctaggctagtctcgaatgcctgtgctcaagcaatcctcctgtcttggcctcccaaagtactgggattataggtatgagccatcatccctggccagaattttttttttttttagacaaatgatagcacacactctaccctgtccaacacacacaattgacttttttctcttgacagtgtacctcagagatcatttatttgtgctgcacttttcttgttcatggttgcgtagtattccactgcatgtatggtagtcacactttatttaattaaggacagatattttggttgtttccaggcttttgcttgttctagacaattccacaaatgaatatcctcaatcatatgccttgtgtttgtgtgttcttttaggatcaattccaccttgcagggccggtgggtgtgtaattgtgataggtattgccaaattgtctttcagagagattgtgctggtgtcaccacgccctctgttctcctcactctcaccagcataaattgcataagtgcaatttgccaatctgataggtgaacagtggcccccagtgtagtttatttgaaaaatgtgtatcacagctttactgagataaaattcccataccatacaatttatctatttaaagtatacaattcagtggtttttagtagagtcacggaattgtacaatcgtcaccacagtcaaatttagaacattttcattactccagaaagaaacttcacccattacagtcactccccacttccccctaaacttcccttccctaggcctaggcagcaactaatctagtttctgtttctatagatttgcctattctggacatttaatagaaatggaatcattcaagtgtgctcttttgtggctggcttctttcacttagcataatgttttcaagattcactcatgttgtagcatggatcaatatttcatttttttttcttgccaaataatattctatcatatggatataccatattttatttatccattcatcagttgatggacatttgggctttctggctattatgggtaatgctgttctggacattcatgcacaagtttttgtatagacatatgtttttcatttctttcgagtgtgtacctaggagtagaattgctagatcatatggtaattccgtgtttaactttttgaggaactgccagactgttttgcaaagcagctgcaccattttacattcccatcagcaatgtctgagggttccaatttctccacattcttgccaacatttgtcttttagattctagccatccatcctagtgtctgtgaagtggcatctcattgtggttttgattttttttttttttttttttgagacagggtctcactctgttgccaaggctaactgcaacctcaaactcttgggctctaacaatcctctcatctcagcctcccaagcagctgggaccaaaagtgtgtgccaccacgcctggctaatttttttttttttttaaatttgtggagatggggtctcaccgtgttgcccaggctggtctcgaactcctgggctcaagtgatcctcgcacctcagcctcccaaagtgctgggattacaggcatgtgccattgtacttggctgttttgatttgtatttccctaattactagtgacattaagcatcttttcatgtgcttattggcaatttgtatatcttctttggaggaatgtctattcaagttctttgcctatttttatgattaatgtaatctatttttttccttagagacagggtctcactatgttgcccaggctagtcttaaagtcctggcctcaagtgatcaccctgcctcagcctcccaagtacctaggactataagtgcatgccaccatgcctgacttaatttttttttttttaattttgtagagataggatcttactctgccacccaggctggagagcaatgctgtgatcatagctgactgtaacctcaaattcctgggctcaagcaatcctcccatctcagcctcctgagtagctaggaccacaggcatgcaacaccacgcctggctaatttttaaaaaagttttagtaggggtctcactatgtttcccaggccggtctcaagctcctggcctcaagagatcctcctgtcttggcttccaaagcactgggattacatgcatgagccactgtaagagatttttatatattgtagatacaagtctcttgtcagatatatgatttgcaaatattttctcctattctgtgggttgtacttttattttcttgatgttgttctttggaaaacagaagtttttaattgtgatgaagtgcagtttatttttccttttgttgcttgtgctctaggtgttgtatttaagaaatcataatctggccaggtgcggtggctcacacctgtaatcccagcactttgggaggccgaggcgggtggatcacctgaggtcaggagttagagaccagcctggccaacatggtgaaaccccgtctctactaaaaatacaaaaattagccaggcgcactggcgggcacctgtgatcccagctactcaggaggatgaggcaggacaatcacttgaattcgggaggcggaggttgcagtgagctgagatcgcaccattttacttcagcctgggcaacagagtgagactccgtctcaaaacaaacagacaaataaacaaacaaacacaaataaaccaaccaaacaaacaaaaaaagaaatcataatccaaggtcataacatttatgcctatattttctttttttttttttttttttttttttgttttttttttttttgtttttttttttgagacggagtctcgctctgtcgcccaggctggagtgcagtggcgggatctcggctcactgcaagctccgcctcccgggttcacgccattctcctgcctcagcctcccaagtagctgggactacaggcgcccgccactacgcccggctattttttgtagttttagtagagacggggtttcaccgttttagccgggatggtctcgatctcctgacctcgtgatccgcccgcctcggcctcccaaagtgctgggattacaggcgtgagccaccgcgcccggctatgcctatattttcttatgagagttttttatttttacctctttcatttaggtttgtgatccaatttgtgttgatttttatgcaggatttgaggaaggtgtccagcttcttctcccttgaattgtcttggcacccttgcataaaatcaattgactgtcaatgtgattgtttccttttggactctgaattcccctccactggtttataagtctacacttataccagtaccatgctgttactgttgttttacagttttgaaattgaaaagtgtgagtcctcaaactttgtttttcttaaagactgtttggctattctgggtcccatgactttccatatgaattttaagatcagtttgtcaattttggcaaagaaactagctgggactttgatagggagcagaccaattggggagtattgccatcttaataatatttaggcttctgagccatgaacacgggatgtctttccatttctttcaaaatttttttgtagttttcggagtataagttttatactttcattaatctttttcctaagtattcttttgatgctatcataaatttccttcttaattttatttttggattcttcattgccaacctatagaaatacaatgtatttttgtgtattgattttgtactttacagccttgctgaactcatttattagttctactgattttttggtggaattcttaggattttctatatataagatcatattatctgcaaaaaaagagagttttccttcttcctttctaatctggatgccttatgtttcattttcgttcctaattgtccgggctagaagctccagtacaatcttgaatagaagtggtgagggtagatattcttttcatttctgatcttggggggatggcacgcagtcttttaccgttaagtaggatgttagctctggggttttctttttcttttttcttttctttcttttctttttctttttttttaagatgggagtctcactctgtcacccaggctggagtgcagtggtgcgatcttggctaactgaaacctttgcctcctgggttcaagcgattctcctgcctcggcctcctgagtagctggaattactggcatctgccaccacacccagctaatttttgtatttttagtagagatgagattttaccatgttggccacactggtctctaactcctgacctcaggtgatccacccggctcggcctcccagagtgctgggattgcaggtgtgagccaccacacccggcctagccgtgaggttttcattgctgctttttatctgggtgaggaggttcccttctatcgtttttgtcatgaaggagtgttgaattttgtcaaatgcttttttctacatgtattagaattattacctggttcttgacctttattatattggtatagtgtatcacattaatcgattttcagaagttaaaccaactttggctgggcttggtacctcacgcctgtaatcccagcactttgggagaccaaggcgggaggattgcctgaggtcaggagttcgaaaccagcctggccaacatggcgaaaccttgtttctactaaaaatacaaaaattagccggctgtgctggcaggcacctgtaatcccagctacttgggaggctgaggaacaagaatcgcttgaacccaggaggtggaggttgcagtgagccgagatcgtgccactgcactccagcctgggtgacagagaaagactccgtctcaaaaaaaaagttaaaccgactttatattcctgacatcggtcttacttggtcatggcatctaattcttttcatatgttgctggatccagttttctagtattttgtagaagatttatatacatgtaatatatatattcattttcataaaagtcattggtctgtaattttcttttcttgtgatgtctttgtgtggttatggtatcggggtaataccggcttcagaaaatgagttgggaagtgtttcctagagaagaactggtataatttcttctttaaaaatttggtagaattcaccagtccagctatctgggcctgggctgcttctgtgagaagatttaaaattaataattccatctctttacttgctttagatttatttgaattttctatttcttcttcttcttcttcttcttcttctttttttttttttttgagacggagtttcactcttgttgcccacgctggagtgcaatggcgccatctcggcccacctcaacctccgcctcttgggttcaagcaattctcctgcttcagcctcctgagtagctgggattacaggcatgtgccaccacgcccggctaattttttatttttagtagaggcagggtttcaccatttacgtgtggcccaggctggtcttgaactcctgaactcaggtgatctgcctgccttggcctcccaaagtgctgggattacaggcgtgagccaccgtgcccagcctatttcttcttatttttgataatttgtgtttttttcctaggaatttcatctaagttatctagtttgttgacatagaattattcatagtagtctcttataatctttgtttctttaaggttagtaataatgtcttccctttcattcctgagtttagtaatttgagtcttctctttttttcttgttcagtgtagctaaaggtttgtcaatcttgttgatcttttcaaagaatcacctcttggttttgttgattttctctattgctttttattttttatttcattaatttctgctctaatttttattctttccttccttgtatagctttaggtttagtttgctcttcttttcacagtgtcttaaggtagaagtttaggttattgatttgaaatctttcttatttttatttttatttatttacttattttgagatggagtttcactcttgttgcccaggctagagtgcaatggtgtgatctcagctcactgcaacctccacctcccaggttcaagcaattctcttgcctcagcctcccaagtagctgggattacaaggcacctgccaccacgcctggctgatttttgtatttttagtagagatggggtttcaccatgttggccaggctggtcttgaactcctgacctccaatccgcccccccttggtctcccaaagtgctaggattacaagtgtgagccactacacctggcctatttctattttttgagagagggtctcgctctgttgcccaggctggagtgtaagtggcacgatcatggctcattgcagctctgaactccggggcttgagcagtcctcctgcctcagcctcccgagtagctgggactaccggcaggtgccaccatgcctgacgatttttcgtgtgtgtgtgtgtgttttttagagatggggatttcaccatctcctgagctcaagcaatccacctgtctcagcctcccagagtgctaggattacaggcgtgagccaccacatctagacggtttcctttttttaaaatataggattttacagctagaaatttccctttaagttctcttttaccacatccatatatttggatatgttgtatcttcattttctttcatctcaaagtattttctaagctttttggtgatttattctttgactcactggtaattgaggagcgtgttgtttagttttcacatattttaattttccaaatttctttctgttattgatttcttacttcattctattgtggttggaaacatactttgtatgatttcactccttttaaatttattgaggcttgttttatggtgtagcatatggtctatcctggagaatgttccatgtgcacttgagaagaacgtgtatctgctgttgttgggtggctggtatggtttgaatttgcatttatcttatgagtgaggttgagcatcttgtcatatgtttgcgagccatttgtttgctttttctgtaaactatatgttgtcatttttcttattttatgggagcttattatatacatgctaagaaaaaaaaacacccttacctatcatatgagttgcaattatttttctttgtttgtcctttgaacttgtttatgatgtctattgagccatatcagatttttatgtagattgatttatcatttaaaaaatggtttctaggtcttatgtcatgtttaggaatgctttccccattcagagatatgaaaattcattatcttttcccctttatgcatatatatacacatatatacacatatacacatatatacatatatacacacatatacacacatatatacatatataaatacatatacacatatatgtacacacacatatgtacatatatacacatatgtacatatacacacatacacacatatatgtacacacatacacatgtatacatatatgtacatatctacacacatgtacatacgtacacacatgcacatatgtacacacgcacacacatgtacatacgcacacacacacacacatattacatatgtacacatgcacacattacatatgtacacacatacacacatgtacacacacatatgtacatatatacacatacacatatatgtacattatacacatatatgcgtatatatacgcatatatacgcatatatgcgtgtatatacgcatatatacgcatatatgcatatatacacacacacatacatatatatattttttgtggatatgaggtttcaccatgttgttcaggctggtctcaaactcctggactcaaacaaccctcctgccttggcccccaaagtgttgggattacaggcgtaagccaccacgcccagctcttcccctttttagagctttattgtttgagtattttgtggtttaaatctgattgatttgtaatttattggcatatatagtgagattgagatccagctttgttttctgatggcagattgttggtcctagctccatcttaaaaatcatccacctttttctcactggtataaactgccatcttcattatatagtaaattcccatatgtttcaggacaacttttggactctattctgttcccctgatgtactgatgtgccaatagcacacagttttaattactgtgtctttatagtaaggtttactgtctggttgggctgtttctccctcattagtcttctttttaggagttctctggctactcttattcatatgtttttacttacaaatttagaaattgacttgcctagttaaaaaaaacttgggtttttttttaattgggatcacattgaacttctagattgatttatgaataatttttttttttttttttagatagagtcttgctctgttgcccaggctggagtgcagtggcattatctcggctcactgcaacctctgcctcccaggttcaagcgattcttctgcctcagcctcccgagtagctaggactacaggtgcctgccaccacacactgctaatttttgtatttatagtagagacggggtttcaccatattggccaggctggtcttgaactcctgacctcatgatctccccacctcggccttccaaagtgctgggattacaggtgtgagccactgcccctggctgatattttaataatgctaagctttctttcattttattttctaattgcaattggtatatatacacataattgatttgggaatgttaacttaattccctgccactttacttaatttgcttttggtttaatagttttgcagtagattctcttggatttcccagacttatacctataccaaatactataataatactctttttttttttttttttttttgagacagagtcttgctctgttgcccaggctggagtacagtagcgtaatcttggctcactgcaacctccacctcccaggtttaagcgactctcatgtctcagcctccagagcagcttggattacaggcatgtgccaccacacctggcttatttttgtacttttaatacagatggggtttcgccatgttgtctaggctgatcttgaactcctgacctcaggtgatccacccgcctctgcctcccaaaatgttgggattacaggtgtgagccaccacacctggccaataataatactcttaccttctcttttctaattccatttattcttcaatttctttttctattctttttttttttgagacagagtctcactttgtcacccaggctggagtgtagtgccatgatctccactcactgcaacctctgcctcctgggttcaagtgattctcctgcctcagcctctcgagtagctgggattacaggtgcctgccaccatgcctgactaatttttgtatttttagtagagacgaggtttcaccatgttggccaggctgatctcgaactcctgacctcaggtgatccacctgccttggcctcccaaagtgctgggattacaggcatgagccaccgcacctggcctctttccttttttttttttgagacagagtctcactctgttgctcaggctggagtgcagtgctgtgataatggctcactgcagcctcaaccttccagactcaagtgattctctcacttcagcctcctgcgtagctgggtctacaggtgcacaccatcatgcctggctaatttcttttgtgtatttttggtagaaatggggtttcaccatgttgcccaggctagtctgaaactcctcaggctcacgtgatcctcctgcctctgcctcacaaggtattgggattacatgcatgagccaacacacctggccaaatttttgtgtttttttttagagatggtgttttaccatgttgccctggaaagtatgaaactcacgggctccagcagtccgtctgcctcagcctcccaaagtgctgggattacaggtgtgagccaccacacccaaccctctttttctaagctaattgtattggcaagtatcttagagtggggttaactggtggacatgtatcttagttcattcaggctgctgtaacaaaataccatagactgggcagcttaaaccatgaacatttatttctcacagctctgaaggctggagagtccaatatcaaggtggcagcagattcagtgtctgatgaggactctcttcctggtttgcaaacggccaccttcttaatgtgtcctcacatggcagagagagacagggctctggtttcctcctcttctcataagggcactaatcccgtcataaggactccatccttatgacttatgtaaacctaatcacctcccaaggcccacctccaaacaccaccacactggggattagggcttcaacatgtgaatctggggtgggggatgcacattcagtccatagtgatatccttgtcttttctgggttctttccctgtaaaggggcttttgtaggccttggctcctaatcaactccaccagacaacacccctcaggaccatgcacagggcatggcacatgtagtaggcattttggaggcttttgcctaactgtcaaagtgactgcaaaagagggcaagtgtctgaacaaggtcttccacagaaatcataataatagccaattagatattgagcactttctatgtgccaggcactttacaaatatgacatcacgcttcctcacaatgaaccccacattatgtaggaacaatcacaccaattcccatttcccaaggctgcatggttaggaagttgcaagctggcatctgaacctggcattctggccccgggccacctgtatatatatatacatattttggagatggagttttgctcttgttgcccaggctggagtgcaatggcacaatgtctgctcactgtaacctccaccacccgggttcaagtgattctcctacctcagcctatcaagtagctgggattacaggcatgcgccaccatgcccagctaattttgtatttctagtagagatggggtttcaccatgttggccaggctggtctctaactcctgacctcaggtgatccacctgcctcagcctcccaaagtgctggaattacaggcatgagccattgtgcccggccccacctgtagtttttgactgctctgtgatgcttctgcttccctggagggtctaagatgtgggcgatgagatcataggttgccctctgacccctgtgttgctttggaccatggggtcattggcacagtgggcggggtaccagaggtaggttctgacactgctctcctgaaccgtgagcatcccagctctgctgcactcacttgctgtgtggccttggacaaggttttagtttctctgaaccttgatcccatctgtaaagtgggtgcagttacagtccctgcgtcactgtgctgttgggtcaattaagaaccaactgtgtgtaaagcgcccagccttgtgcttggcattcaaggccctgccactgcctcctcttattccctggaatgataataacaacagtaaacaacattgtgtgctgtttgtcatgcacttattcttttcctgccacaaggactctcactcgtacttttcagttgttaggtttctatccccattttaaaggggaggaaactcacaggcaaagtgacttgcacaagaaaatgtagctactaagaagtgcagccaggactcgaacccaggtttgactggagtcctcactctcagctcctaagctcctggcctactctccacccttagaagaggtgagatgatgttcttcagagtcaggaaggaaggggctggtgtgtggtggctgaacagcagtgtgacctgagcatctgtgagccaggaggtgagagagagtgtgtggcaccctgtggttgggtagatcattgtgggaggatgggacacgccgtgggagcatgggacacaccatgggagacggcagcaccaccagctgcagggccatgtggacccaggtgatggctttaggcctcatccacaggcttatgatgggaagctcttgaatattttttaaaaattgtcactttagaaaatcatgacaaagtcatttctaaatgtcaactgatacagggtgtaaagtgaaaaagggattttcctctccccatcccacacttttgagatgaaacattgtgatgaatttggaatccttccagagctttctttttttaaagtttttttaatttttaatttttatgggcacatagtaggtgtatatatttatggggtacatgagatatcttgacacaggcatacattgtgtaataatcacatcagggtaagtagggtatccgtcacctcagttatcattcctttgtgttacaaacaatccaattctactcttttagttttttttaaaattattattattattttatttttattttttttgagacatggtctcactgtgttgctcaggcagagtgcatgtgtgtgtgtgcaatttcctttctttcttctctttttttttttttttttttgagacagggtctcgttctgtcatccaggctggagtgcagtggcgcgatgatagctcactgcagcctcaaactccagggctcaagtgatccccccacctcagccttccaagtagctgggactacaggctaatttttaatcttctatagagatacagtctcactatgttgcccaggctcaatcttctttacagagataatagcagctcatgtttgctacaggtccagtaccacattaagcccactgcctgcattatcatgtttgattgctcacaaccctattatgtgggtagcatcgtccccattttccagaggaggaaactgaggccctaatatgcccagaggagattctaccctgccgctgccttcttttcactgaaacagtgtgttggggtctcttatcaggccactctcagctctcattctttgtaatggctgcactgctgtccacttgaggactggagcccctttatttaaccagcccctctctgaggaacacgtaggttgttaatggctttctgtggagagttttaagcggaggaggcccagttgtctgtgaggtttacagagccgcctctggctgcggggggagggtggactggaggggcccacactgctgtgtccaggcctaggatcacagggccctggcctgaaggactggagatagacagggtggaggggaggaatgcgcttgaggaagattcaggaactaccccggggctccccaagggcagagccccacacagggcttggcacgtggcaggtgctctgcgaatacctggagaatgactggggtgggatgtgcaggggttgtcgctgagtcagtgatggggatgggggtgggggggagatgcaggcttagcgggaggtactaggccacttggggacctgctgagctcaaggcactgggaacgccgagggaaaagttcttatagcagcaactcggcacctctcgagggagcgagccatagtgcaggccccctgtctgctgaggagtccagagcccacggtgaggagtggcttcccgaaggaaaggggccacctttccctgggaacctcaggcagccccattgtggggcccccactgcttccccttgacccccgcaagggtctatctctaccttggaggctgcaagtggcggaagagatgaggggggttggcccctctccaaggagcaactcatggtgactcggcagttgggccccagaaccaggaagtgcaaggatagagctctgtgccagggaggagggtggtctctcatgaggtcccacggcatggaagcagccctccgagactaactcccaccctcactgagtcatcgagtgaagagccgtgtagctttcgagaccagcccagccgacatggtggaaccccgtgtctactaaaaataccagaattagccgggagtggtggcactcacctgtaatcccagctactcaggaggctgaggcagtagaattgcttgaacctgggaggcgaagggtgcagtgagccgagatcacaccattgcactccagcctgggcgacagaggagactctgtctcaaaaaaaaaaaataataataataattagccaggcgtggtattcggtgactgtaatcccagctacttgggaggctgaggcaggagaaccgctggaacccgggaggcggaggttgcagtgagccgagatcgcgccactgcactccagcctgggcaatagagtgagactccatttcaaaaaaaaaaaaaaaaggaaaagaaaaagaacgagagagcttggagtaaaaaaaaaaaaaaaaaaaaaaaaaggaaaagaaaaaagaaaaagaccgagagagcttggagtggcctgagaagatgctctgaacacactaacacataaagtgaaaagagggaggcggcagtgtagaatctcctctgggtatctcagggcctcagtttcctcatctggaaagtgggggccacagtgctacccgcatgaccctcagtgggccattcttgctcaaggacgttctgctcggagctttctcaggctttctctgggagtggggtgggctgctttatcctctcacccctcttccaaggccatctggctgctttgtgagagagatccctgggggtaggaggtggggcctgtgagtttcagcccctgattcccacctgcccagtgtggtggccccttttcactctcacccatgctgtgtgacttcaggcaagttcttcaacctctctgtgtcttaatgtcctcaacagtaagataaagacatgattagtatttacctcctagattatcatgaggagccgatgagtcaatgtttgcaaagtacttagagcaaggtccaattcaaggtctgagctctgggagtatttgaataccacggaatgatatttagtcttttcagtgtggcattgcaggaacaaagtaggatgcaaattatacatccatgcccatttagtcttttgtctattctgcaaatagttccagagcacctagtgggtgtcaggcccgtcctggtctctgggggcatggagatggatcctgcctggccctgacagccgcgagtgcacagtggagggcactgggtggaccccagtttgttgaccgtcttgcgttgctgtgacgctggaaggaaacgcaccaccacacccaggtgtttgtcttctaggggcagaattatggggcattttcttttattttttcttttctttttttttaatcttcttgtagttctcaaagagtccactctgaatgataaaagttaccatttacggaggcctggtaacgttccgtgccatcctgagcatgttccgtgtacttttctcacggattctcccagcagtcctgacacgggtgttattcccgatcgatagagaggaaaactgaggcgaagggcggccggccaggattcaaaccagggagtctgctccagcactccggctcttaacctcaaccgtctgcctctccacaaacaccaggatcaaccaccaagaccaaaaaaacagtctcacaaaccatcaaacattgcacttggtggctcaggaccttagcttcgtcttaaaggtccctgttatgctttttctgagtgccccagtgtggagtggtcttcgtgtttgtgagtgcaggggtcaggggttgtgtcttttcttcttgtccccttccaagaggtgacatgtatccttgatactggaagggcccttaaggtctagccctggctctctgtctcccttcatggcacatcagccaagtacccattctcccgtctttgattacctccagtgacagggagctcactcctcaacatttattttattctaaagaaaattcaggctcttagatagttcttcctccataaaaattttttaaaaaaatttttacttcctcttaaagtctcataaacaagtcccctgctttggggtcctgaggcaggacctggctaattcgtctctatgtccccctatagtgaggagcacagggcctgctagtaggtactataaatgctgcaccaggaagcaagtggctagggggcgggctggttgggcccccatcaatccttgggctgcaggtaaccaggtcagcagttcttgtgggacaccagctgggtgagtgctgatgggtatcgtgacctcaatggaataggttgccatagaaactgactttggacctgtccccaggtccattgacttgtccctcaggagaccatggtaatcccttgagctcttcagcaggtctccccagggcctccccaaccccacattctctgagctgggtggtccccagggagcatgcaaaccatacccccattgtgcagctgggtagcctgaggccccaggggcacaggggacaggctgaaattcacacaggcagggggcgtctcatagctgggctgggcgctcagggcaaacagccttgcccgaggacccagccagtcagggggccttttccccactcatgggttctcagaggaaattctggaccgattcccaggccttctgcctccccaaagaataatcggaacctgcctccctggtgtgtccagaattacacaatatcaataacggctgaggtgacctgtgatgcccctagcaccctacagtgtcttgtgcatttatcacaatgaccccatcgttacagatgaggaaacggcacagagagaagttaagtcacatgcctaaggttacacagctatttaggggtagagccaggatctggatgtggagagcccagctccagagcccactctcaccaccatgccataccctgtctcgctcttgctttgagagggttgaaaagactttgggagggttgaaggatatttcaggtctaggaggctcttagcacgggcctgctagagccatagcctgatgaacagtgatcagagagtgggcgccattatgatttctctttctaatgacatcctcaaaacagtgctgagatgtctgctttatccctgctttgcagatgaggacgctgaggcccagagagggaaagccacttgcctagggacacacagcggggagaggtggagcagggcctctatttcgagacccctgactccacacctggtgtttgtgccaagaccccaggctgcctcccaggtcctctgggacagcccctgccttctaccaggtgagatgatggccctatcagggctcaagatgggtggggagatcccagcgaatctgggtgggagctgggaccagccagggcctgcggatggggaaatgggaggcagagggtggtggcaggactgtgggcgtcagggggagttttcaacttggtttactctgtgtttccgtctctctggacctcccaggtttctggctctgaagtcccttagctcttaaatagtcactcattcgttcagctgtttactgagcacctactgtgtgccacaccccatgctaggcactgggagcacagcagtgaacaagatgaacaaaagcccacgacagtagtcacataaccacatgaattcaaacaacaaaaacaaaacaggaccacatgttatcaaagacagacacaagtcagggggacccagtgaaaggatttggggaacacttcccaaggaggggacttttgagttgagaacggaaggaggcaccagtcaccctggtgaagtggccagggaacagcatttgggcagtgggaatggtatgtgtgaaggccctgtggctggagtgagctcccagccatctctgcttcaaacctcctgctgtatggccttggctgccacttttagcacctttccccagcgttaggcaattcccgtcagccacgtattcattcaacaaaccctcaatgagccccctccatgtgctaggtgcccgggacataggcgtggctcagatactgtccctgccaggagggagggaaacagtgactcagggggaggtgggtgggtaaggtcagggcttctgattatgaggcatttcttccgttcctggcgctggaccgaggaagccctttacggatggatgccatccttacgctcattttacagatgaagacatcgaggttttgagaggctaactctcccaaaaaggctggtgcccctgtcccccatttttttcttttctttcttttttttttgagacagagtattcctctgacgcccaggctggagtgcagtggcaggatctgagctcactgcagcctctgcctcccctgttcaagcgattctcctgcctcaccctccggagtagctgggactacaggcgcgtgccaccatgcccggctaatttttttttttttttcaagtagagcccgggtttccgcgtgttggcccggcaggtctcaaactcctgatctcaagtgatccgcccgcttcggcctcccaaagtgctgggattacaggcgtgagccaccgcgcccggccctgctgcctctccttgggcctcgttttccctatctgtggaatgggtgggagggaggccggccaaggggccccggcagccctgcctgttccagtgtcttctctctctcctgccaggaccatgggtagcaacaagagcaagcccaaggatgccagccagcggcgccgcagcctggagcccgccgagaacgtgcacggcgctggcgggggcgctttccccgcctcgcagacccccagcaagccagcctcggccgacggccaccgcggccccagcgcggccttcgcccccgcggccgccgagcccaagctgttcggaggcttcaactcctcggacaccgtcacctccccgcagagggcgggcccgctggccggtcagtgcgcgggcggcgcggggtcctcgcccacctggggccacggcggggaggcggcggggctgtgtgcccggggtcgccccctctgcgcaggcccttcctctcgccaggggtagcgcccctgggtgacttgggtgtccggggggtgggggggcggccgtacacactgtgaagcgtccgcgccgccgccgctggctttggggtggagcaagcgcaaaagacacggggtgtggttaatgggttctaattggacgcttaagcccaagaagaagaagggcggcgcgggaccgggcctgttgctgccttggcgcccagtcctttttcgttgcctgggtccgcccagagatgagtcgggacgcgcggcccacgtgcggcggaggggcagctgggtcgctcggggaacggggcaccggatggccccggttgggcccgcgccaggatgcgcccctgcgccctctgctggcgctctgcggtcaccgcagccccggagagggccgttttggagagccgcggcggtgccccagacactccacgcagacttcactccttcactcagacccgttcactctccccacaggcacacgctgggccacacacacggctacacccccgccagggacacgcacacatgcggggtggaggcagggtcacagacacccgcagacacatccccaacgcagatgtacccagatacaaactcacatgcacaggtgacctcacacttgtagctgaagacacacgcacatgccgtcagaagcgcattcagagacacacgctcagctggaaatcacaatctcaccatcgtggccgcccaggagacagatacacacaggtgcatcgagaacatgagaacactcagagacacacggacaggcgtggacccttcagacgcagacgcacgcccaagcgagagaaacagacccacagacacaccattcatttgttcaataagtatatgtggagctcctactacaggccagggctcctctgctgcccgggccccagcggtgcagacagaacccacctgggggaaggaagcaaagggcagctcgtggagggtgttagaaggggcgctgctgcgaaggcgcaaaacaggcagggagggagggctgggggatgtgaggaggtggaggctgtagcttaaaatggtggaagggggtacgggggcctttctgagggggcagttacttggagccaaatcttcctggacaccaggagcgcccagagtgacacactttatagagagagagcgagcctcctgggggagtgttcttcattcaccgcttccttcagcctatagctctttcttgagcacctactatgtgcctggctctggaaacaaaacaaagatgctggttattggcgacttctgctcctagagcaagacaggcaccaaacagataagccagcacccagcactgcccaaagccccggggacggacgcggacaggaagggatgctcccgctcccacacgcccttgcagggatgcgcagatacacggatgcagtggacacgtgcacaggcccatcttcactgaacctgactgtgtctttgggctgagcacttgcgtgtgggagacaaatccactcctcctgggtacagggccatcctgcccatgccttccctggctgtggccccactgttctgacacaccccacccctctctgcaggtggagtgaccacctttgtggccctctatgactatgagtctaggacggagacagacctgtccttcaagaaaggcgagcggctccagattgtcaacaacacgtgagtgcccccttccctattgcccctcagggctgggtggtgggacttcaaagcgggcaggggctcatgcaggatctggcatcagggcagcacagtgcagagcccagggcagtgcgaagcccagggcagtgtggaggcaggcgcctgctgcactctcgccctgggcagcacctgctgttgctcccccagccatggggaactcctcccaatccctggctctcgcttgctccctccagccctctctcagcttctccctctctctgcttctctctcgctggcccttaggaggaaggtggatgtcaggtgtgtacatgctccgtgggcggcgggctgggcggggtgcttcgcggggggtgggggctgctgtctgcatgtgcttccactccctgcctgtgatctctggctctcttggctgctcctcacctcccagcttctcccctcccccctccaccaatttgattaggtcctggaccttaacgcaggctgcgatcaggggcccttccattgcactctcctgcacatctcctccccatccaccttcctactcactcaccctcccattctgccccgtcagcccacccaagtatctgctgcatgcaggacccagtgctgtgatggggatagcctgggtggagaaggccttggccacgtccccctggagccagcatgtggccagggagacagcacatggccccagcccaggccaagagtcaggcagtgggcgagcccagagtcggctcctggagcccctgctgtggacctgcctccggtgatgaccacagggactgagagggtcaagggcctcgaaggaaagccagtgaagttatctggcaggtggaggtggtggaagggcagcttgcgggagggtgccggactggagggggctgacgccttcacgggtgtggaaggcaggaaggttctagaaggcagaggagaatcgatccctgggtgtcctcgaaggcctggctaaggaagttgggggtttccactgccccgagcgtgtctggcttgctcatgccccacttgccttgcgcatgctcttccctttgcctgaaatgccctttctccagtgtctgcctggggaactcctgttcatcgctcaagatcagtgcaggactgccttctcagaggggcaaaggggaacagaggtgccagttgccatgccagtcgtctccacctgtgtccttgtattgactcctctctgcagtctagccagggctgaagtgatcggggagggggctgtctccattttgcagatgaggaaactgaggctcagcgatgtgaaggcccttgtccaaggtcacacagctgccaagtagcaaagccaggattggaaccgaagcagcaactttctgccctcctcaacctgctcttggcgggggggtgggagggggggctctcccggctccgcctccccccttgcatggccgagtcctggtgcgaagctacagtttccttattgtcaccagctgtttgtgtctgcttcccccctaaactgggagctgctggagggtggctctctggtgcacctcacttctgggtccccatagcacctgtaactcagcacagtggcgggtgcccagcaggtgatggtgaacaggatgaatgaacagcagtgacaatgtcaccatttcttgtgctctctgtgtgagctgggccctgtgctgagtgcttgaagttgcgttattttatttacgcatcaccatagcctcgagaaatgggaagtcttacttgcaccattttacagatgaggaaactgaggcccaaagaggtgaaataacttacccaaggtcacatggctagtagtggcagagctggaagactaggctggccctccgacccatgatcctttcaggaaggctcagtggaggtgcagcagaggccacaggagggagaggcccgtgcaggggaggggcgtcagcaggatggctctgaagtcctggtggagtctctaccaagcgtctcagactggggtgacagctggggcagagctgtggaggcaggaagggctgggagaactttggttctgcctttttcacctggattcagagagtagccccatgcttgcctttttccagccctttccctccactcttcttgtcttccagggagggtgggctgggggaggtttggccaggaggctggggctgccaggaggcctggaagtgatggaatctcattcagggaagaccctggggtagctgattgggagatgggggtgggtggattgggagcccctcctcatgtcacaatgctccaatgctccttcgcttagacgtcagagatggtggctgagcgcggtggctcacgcctgtaatcccagcactttgggaggctgaggcaggaggatcgcttgaacccagaagtttgagaccagcctgggaaacatagggagacctggcctctacaaaatataaaaataaattagctaggtgtggtggcgcatgccagtggtcccagctactcaggaggctgaggcaggaggatcgctggaaccaggagttgaaggctgcagtgagccatgatcgtgctactgcactccagcctgggtgacagagcaagactctgtctcaaaaaaaagaagtgaaggagggaggtgtaggtggggggctggtattagtagaagaggagagggaaagggatttggggggcggggcttggtaggagatgggccaccggaatttaaggtgtttgagtctcacacctcatcccggggacccgcctgcatgcacgtccttcctccatcagtgctcagggcctattactgtgcagtgcctcccccaccctgtaagagtggggggctttctgaatctagcatggggcccaggcacgtgtggaggctgggctggctgtcagggcagtagagagctagaggaggaacccgtctgtggatggggtctggccaagtgggggtcctcgcagtagcagacccagagatcccgcgccatggatcttgctgccacatggccctgggtcctggtattctgggtattgtgtggccctgggtgtgaggaagccctctggggctgaggtctgactgcctcaagctccctcatctgacatcctagtctcaggagtcagggcccctcctgggtctgactctgggttgctccctgaactgccccttcctcccacccaaattccaggagcttcttttgggagttttctggcaggcgcttctgggcaacagcgcctcagctggcctctgcctccttgcccccggcatggcggcagggggcacctcgggagtctagagcctcggggtcctgccttcatgctctcctccagagacctgtgctggcttcacccctgcctcgctcctccctcaccccacagaccatgtgctccaggtcttggggcttggcaattgacctcctggccactgcccacctggccagcctcagctgtggtgcaccagctcagcggccatccccagagtgccctcccaaccagtcccagcagcccaagggagcgaatgtcagtgcccacgctggcacatgtcccaggttccaaagctgccgtgcccctgagccacacgccaccctggctggccccaaggattagggccccaaaagaggatcctgaggctcagagaggtgaactcagttgcttgaggtcacacagctggtgaccagcagttgtgaaaaatcatggctctgggactcttggcccttcttctagccatgggtgggaaggcttcccttccttccctgcttgctgcccacctgatgaggaccaggcccgggggaaggtgctggatgccgtagaattcctctccctgatggcttgatgctgctgtgactggtgaccgcagccaccggaggcagctttgagcctcccaagcccttgacatgggaagatggggattgatatctccatttcacaggtgggcaaactgaggctcagatgatcatcacagtcgtcatctcagtttactctgagcccagcatgacgctcactgtttacacactttgcctgcaagggagattctgtgaatgttgtctgctttttacatatgaggaaactaagactcagagagggcagggtacttgcccaagatcacacagcaaatccttgttggagactgggactgtgctgctttggtttttaaaaagggtcactgtggaaataccaatttagttgtttttatttttattttttagctaaatccagatctaacagctgatgcatgttgtgctgggctctgatctggctttttttttttttttttttttttttttgagaccggatcttgctctgtggcccaggctggagtgcagtggtgcgatcttggcttactgcaatctctaccttctgggttcaagtgattctcctgcctcagcttcccagcttcccaagtagctgagattacaggcacgcaccaccatgcccagctaatttttatatttttattagagacggggtttcgccatgttgctgggctggtctcgaactcctgacctcaagagatccatccaccttggcctcccgaagtgttgggatcacaggcgtgagccaccgtgcgctgtctgttctggcatttgatatcctgggagggagacatgctgaccctgcagatgaggaaactgagactggcgagtgtggtatggaggggccaaggtcagacagccagcaagtggtgagctgggatggtgtctagggcagtgcagcactggagcccattccctcagacccctctaaatcaggggccaggctgagactggatcttgggtccttcagtaaaattggagtgcatctcatctctctccctgccccttgtgaaatgaaacctccagactagaccatgaaaccccaggctcacaggtgggctgactctggggagctgggagccctgctcgctgaagtcgggtagcatcggctgcactcctctcgctcttgggccctgcttggctggcctccgagcacaggcctcctgccagccttccactctgggtggctggagactccccagaggccggccagcctgcggactgcagctttgtcaaacggcctcaatttttagcgtctggtcttagaccttggccccttcccgctgtggcctgtcctctgaccccgccctgcagcctcctctttcatctgccacaggctttcccaaaggtctcagcctctctggggcctggggaggccctactgtgcctggctgtggacagtcaggggccctgcttctcactcttgctctgccattggttgaccatgtggctttgggcaaatcactggcctgtctgtgtctcattttcccccactggtaaatggaggctttgaactgaaagatctcagagagctgttttctgtgatttgagtccttgctttgtagctttgggcaagtcgctgcacctctctgtccctcagtttccccaactctctaaagaaagtgctggccaggcgcggtggctcactcctgtaatcccagcactttgggaggccgaggtgggcagatcacttgaggtcaggagttcgagaccaccctggccaacatggtgaaaccccgtctctactaaaaatacaaaaattagctgggcatggtggggcttgcctgtaatcccaactactcaggaggctgaggcaggagaatcgcttgaacctgggaggtgaagtttgcagtgagccgagatcgcgctgttgcactccagcctgggtgatagagcaagactccatctcaaaaaaataaataaataaataaagtgctgggctactctgacctgggtgctgtgtgtccctgcgctgatcgcttgacatttctgagccagtttcttcatctggggcctggagccctgccttcctcccttgcagggtggccttgggggtcagtgggagagacaagtgtggacaccccgggtgggtgtacaacaaggaggtgggtggggatttggggcatccaaaggcttcttttcttgaggtgggtcttgcctccttactcccgggccctccctccagtgaccccatatggcttgcccccctgcccgagtgtgtgtgtagccatcacagagccaagacaggccacacagccccagtcacacccccttgcctcactccatcaggaggggacacaacaccctctggctcacttcgagccatccggctgaaccccagtgtctcaggtgctcacctgtcctccgacaggtccctggagagctccccaagccctgctccctcctggcctcaacttctccatcttctatatgggctgaagaatatggccaggggcagctcagaagaagtgggagccagggatccaggttcatgttcagattgtgtgactgtaggcaagggcctttctctctctgggccctggcggtgggtgggggccaccctgcctgccgtgtgtcttctcagggtcctggtgaagtacaaaagtggccttggattgagaagagcccagcaagctgtcaagccctgctgcaacctgcagggggtgctcctatctgggagtcaggagcctgggcctggctgtgtgaccttgagcaaagaggcctttgcttctctggcctcagtcttcccagctgtacagtgggaatgagaggggctggaccctagttcccaggtctccctgcccattgacctctcctcactccctgtggaccccgtccctgtccccttggttgctttggatgtgaggcctctgtggctgccccctcgtcccctgtccccagcaccgcctggctctcccgctctctcccctgctctttctgccactctccgcctctcaccacccccatctctgcctcttctctcctgttgggctctcgctctctcctccctcctctgtgtctctggacccccgctccagccagacctggttcacattcagatggctgcaaaggtacttccgcccctccccgctcccgcccaggcccaggggacccgaccacgccgggagctcttcctgccccatccccatcacaccccccactccttctcctcactttcgcatagaagtgccctgggcattggggctctgccacctcaccccctctgacagggctcactgtgtgactttgggcaagtcccagccccctctggcctcagtttccccctgcagatgggtaggctggaggaggaggcctgtagttttcagccgaggagccctttaggtgtgacccgtgatttgggacagaggcaagccttgctctagtttgcagggttggggcctggatggtcactgggtcccagcagggcccctgcttgcctccacccaggtctcaccagctcccaggagcgggcttccaaatctcagagcatggggacactttgtaggtctcacttgactttctctcagccaggaatctcttctattacaaccttacttgcccgcagagacagggggttccctccctccctcccaaggcagctctcggcatcttgagatgtcttggtacatctgaaaggaagtgaatttcttcctgtcccgggactcctcccctatggatttgagcctcagatgaccaaggccagtcctgccctggtccaagacaaagtccatctgatccagctttggcaaaaaggcgtctgcgccagggaggggaggagttccaggccagctggacctggcatgctgtggggactcacgctggccccaccacctccctgggcctccctcagccactagagccctgagcacagcacctaggaggatggtgggcaccgggcttgtggctgacggctcccttctcctttcctccctccttctgtccctgctcagagagggagactggtggctggcccactcgctcagcacaggacagacaggctacatccccagcaactacgtggcgccctccgactccatccaggctgaggagtgagtaccgtctctggctgcctctacccgtcgtccctggacactgccggtgcagagtgcctctcctgggctggggtgggaggtctggctgtccagcgccccagccatatccagggagaagcactgtgagtgggcagaagcctggacagtcagcaccatcctccgtcctcccacccccaggtggtattttggcaagatcaccagacgggagtcagagcggttactgctcaatgcagagaacccgagagggaccttcctcgtgcgagaaagtgagaccacgaaaggtacgagcgctcttgctggccaacggatactgagtcttctgtgagtggtttgagctgggtgttgtggaatgagcaggagtttggtttgtggagtagggagggaagaaccttccgggtggaggtaatggcaggatcaaagtcagggaggtgcatttgaggaacactgagtaatccgcggtggccagatgtccagagaaagatgaggcttagtctctctggcctcagttttctcagataaaagatgaacataggttgtctggaggtctgagtgtcacacagtaacaggctcgttcccagggtaggtgctgctacaatgagccccgcttcttcctcttccccaggggtccctgggctgcactggatgctggaggctggttttgccctcccccaactgcagtcctggtccctgcccctctcctgtccctcccctgagccagagaatgaagaccatcccctttctctccagcccctctgaaagtgggttgcaggcgcccgtcaccatggcagccaagctgagctgcttcctgtgggcctggggctcagcgggagatgggaagcagagcatccatgtcgagccgtgcatttacgagcagtcgtgcagccatgtgcgggtgtgcatgctgtgtgtacatctgggcgtgtgtgtgtgtgcatgtggggtggaattgtctgtgtgttgctgtgtgggaatggactgctgtggtttgtctggtgcctgagggcctagggagcgtgtacttgtgtgagcgtgtggctactgggcatgggcatgcctgtgcgtgtatggacatgtggctggggttggcttcagcctcaggcctgtggcttccacatgcaccctcccgggccatcagtagaaaatcatggttgcctaaggcaggctttgagtccccggatgtgggtttgagccccagccctgtctctggtttgctgggtgaccccaggctggccacttccctctctggacctcatttcttctgtacgctgggattgtaatctcctgaagatcgcagagggggaggtctgtgggctaggatggctgggcttcccccatgcccatgcactgcctggccaggctcctgagaaggcctgtccctggctgctggagcctctgcccctgcctccggggctcagccttgttccctgatgccatttgggcgtctcttggcctctggtcctacccaggcctgctggatgggaggaaacttttccggccaaaagcttttctatgctcaagggaaagaggggaggcaccagggctggccccgtttgacccaggcagccttcaggccacacccagcccgtggtctcctgcccacgacggccaaagcctctgccaaccaccccctcccgcctgagcctgggcctgtcttcagcaaggaggttggggggacatggacagtgcccccgcaagctgacccagagagggaaagcagttaggccagggccacacagccacagggagccactcacaggctcccagcagttattgagtgcccagtgtgtgccgggcccttctatatgtggttgcatggaatctccccagcagccctgggagcacccgcattgtgcagaggaggaaactgaggcccagatagggccagcaacccctccaagtctcatagctaggatgtgcacctgggatatggaggtcttgctggggccaagggtgcgtggcaggacgtactaatcaagtgtctcttgggtcccttggccctgcctctgtggctgccccggggctggctgttgagagacagggtgggcctggggccccgcctgggcctcccttccctccaatgtcaggcaggcacagaacggtgtccagagcagcggcctgcggggggagagggcatggcggtcacggctcccctcggtgccccgcaggtgcctactgcctctcagtgtctgacttcgacaacgccaagggcctcaacgtgaagcactacaagatccgcaagctggacagcggcggcttctacatcacctcccgcacccagttcaacagcctgcagcagctggtggcctactactccagtgagccagcctcggagggcggagggcgggcgggcaaagcctcagctgcagactctggggaggggccttggagcctagaagggtggggacttctgttatcctgcttctctccccacttccccctcccccctcccttcctctctcctcccttttccctcctttccttgtctccttcttcttcctcttctttcccccagcccccctcctccctgtccccctctctccctgctccacgcagtgtcccactgcccgcctttctctgcagctggctggtatggagggggctgccctgaggagccccagagtaagctggaagggaggggacagaggctggtgtcatttgtctctgtagccctaggaccggtctgaaccggttgctgggagaggaggagggggcggccagatcgattgcagcaaagagggaagagagcggcagagggagctcgcggggcttgcgtgctgggtgagggctcgggcgtgggcgcagtgctgtagcccacccacctgggcatccgaagctgactgcagtgtcgggcctgtgggtgcctgtgtgcccgtgtgtctgtggcacacatggcctctgtgcacaggtgttggtccactccccaccccgagcctcctcctcctctcagcttggcctcctgacttcctctgggatcacccgccactctctgtctcttcggccaccgctgtgtagctcattctgaacccctttccctcagatcagaactctccaggggctgtcttggaatcttgggataaagacccccaccggcccctgagtggtctaatcctaactgcctccccacctccgcctggtgccacccttccccacctgctccctgcgcccctttgtcctccgcttctccagccctgcagctgttctttcctcagagcctttgctctggctgtgcccctgcctggagggctcttccctacttaacccctcaccgtcctgcacatccaagctcagttgctgcttcctccaggaagccttccaggccactcctgctgttgcgcgaacagctctccagtcacattcacatctgtggtcctgggaggtgattagggaagtggggctcctccctggactctgagttcctgagggcaggttccctggacatgttccctccccgcagggttcctggcaccccctactgtctgctgaatgactgactgaatgactgactcagcagatgcataaagcactgtgggcctgtgtgggggtggggctgtgtgcacacagatgtagatgcctggctttgagggcaccctgcgtgtcccctgaaatctgtgtgcatctggcatgtagggcgacacacactgaggggcagggaggccccagggcagaagacccgcctaactgctcctcctgcctcctcctcagaacacgccgatggcctgtgccaccgcctcaccaccgtgtgccccacgtccaagccgcagactcagggcctggccaaggatgcctgggagatccctcgggagtcgctgcggctggaggtcaagctgggccagggctgctttggcgaggtgtggatgggtaaggcctggcccctgccctcgggagaggcatccaccccccaccccgtgtggcagctccgggctcccttggtccctttgcctttagctgcctctgctggatgacggggccctgttgtaaatctggagctccccagcggtggctggcaccgagttgggttgtggccacccaagcactgtgccccggaccgtgcaaaccatagtgcctgattccaagatccgcacagggctgggcattgcacagacctgctgtgtaggctgggcccggtggcctcactcagagcctcagtcttcccgactgtgaatggggctggtgacagtgggacctatgggagactgtggagaccctgacccagtgcgtgtccacacactagctgttcgccatggagagagaagcccggctcgcaggagggagtgctgggaagcttaggtctggcatggtctgggcctgttagcgatttcccgtctgaccctggagaaacagcaaagcatgagcaccgtgcagccctgacaaaacccaggcccctcttccaccggatgctttctgctcacacggagggaccggaggccagggtggaggagagacggcggttgtaaccccgtaagcccatggtgctagcggggatcacggtgcgctgttttcaaggtggtttcatctgagccgcatctccactcactcccactgcctccacgttccgccctccagagggctgatggaggagagcagagcggcctcctgggtggaaggcactgcagggacagaggcctggaggctggaggtcaggctgtccgggaaggggaggcgtgggctttgagctggtgagaggggagaggggtgagaagccagggtgtgggcacagccacaaagtgaggacttgagcaacacctgggtgaatgcacagcgtcagccattatggtggctgcaaaactcatttctggcttgggtgagaggtgctgtccctgggaagggcctcacttcctccctgggtgctccaggtcgactcatgaagtgccacatgcagatggcctgagccagcagggccacagagattggcctgagccccaaccctcggacggaggcccagcgactgggaggaacgggcccaaggtcacacatcaaaggaacctcgaggcccactgggacaagaacctggattaaacatgctggtctagaatgcagcttcccccagagccccacagttagaaaagcagatagtagtgaaatgataaccacattacttactgagccctcacggtggggctggcccagtggttaaaatctcattcaatcctcaaacagctccacgggtaggcactatggaatccccattttccagatgagataactgaggcttagagaggggaactgactctcccatggtctctccgctggcaggaggcggaggtgagaggctctggccagcctgacccccaagccctcatgcttaggacagtgtctcattttggggggcgggtgggctccagaggtgacctcttgttctggcaacagccttagaaatccctgggccagctccacatcacccctggcttccaccagtacacattgcatttgctaacacatgaggcacgttcaaagtcctgctcagagggaacatgactaacccagaagtgacaccggttgagttggaaccttggtcccctatctgtctaggctaataagctgctttttaggactttttttttttttttagacaggatctcactctgtcacccaggctggagtgcagtggcacagtttcggctcactgcaacctctgcctcccaggctcaaaccattctcctgcctcagcctcccgagtatccagtattacaggcacgcaccactaccacctagctaatttttgtatttttagtggagacagggtttcaccatgttggccaggctggtcttgaactcctgacctcaaatgatccacccgcctcggccccctaaagtgctgggattacaggcgtgagccaccacgcccagcctggacattcttaataatcacagtcccgacaacagctactggttcttgagcatttaatcctagtaacagtgccatgaggagcaccctgtcattgtacccattgtacagatggggagactgaggctcagaaagggcccaggctttgactgggtttgtcacatggctgtggaggccacagctgacactggcgcccaggtgggcagatcctggatccctgtgtggtaggagttggggggctccactgagtcagcctgcatccctcctcaacagggacctggaacggtaccaccagggtggccatcaaaaccctgaagcctggcacgatgtctccagaggccttcctgcaggaggcccaggtcatgaagaagctgaggcatgagaagctggtgcagttgtatgctgtggtttcagaggagcccatttacatcgtcacggagtacatgagcaagggtgagtcctgggcggccggggcagggggcaggggcactccggacagggcagggagcatgagcctcatttcctctcatgtctagaatgggcatcttcaaaggtggaatgcagtagagccaaattctctgttgcctgggccggagtgtggtggtgcaatcatagctcacttcagcctcaaccttccaggctcaagcagttctcccacctcagccacccaagtagctgggaccacaggtgtgtgtcaccaggcccagctaattttttattttttgtagagatgggaccctatgttgcccaggctggtctcgaactcttgggctcaaggagtcctcccacttccacctcccaaagtgctgggattacaggtgtgagccacagtaatttttaaactaattagttatttttcaaaattccactttttggaggtatagtttacatatgataaaatacaccccttttaagtgttcagttcagtgggttttaacaactggatttactgtgtacccctaaccataatgaagatatataacatctccatcacccagaaagttcctcatgccctttgcagacagtaccctccagccccaaacccaagcacccactgatttgctttctgtcattataaatttgttttgtttattctagaatttcatacatggaatcttttacatctgggatgcattgtttttttactttttacatttcaattttttattttttgagatgaggtcttgctatgttgcccaggctggagtgcagtggcgtgatcatagctcactgcagccttgacctcccaggctcaattgatcttctcatctcagcctctcaagtagctgggactacaggtgcacaacatcctgcccagctacttttttttttcgtattttttgtacagacagagacttactgtgtagctcaggctggtctcaaactattgggctcaagcgatcttcccacctcggcctcccacagtgctgggattgcaggcaggagccactgctcccggcctgagatgcatccttgttgcatctcccagcagtttgttcctgttgttgctgagcgggactccgctgtctgcattagcacagtttacctgttcacctggaggtggacttctgcttgtttcccatcctgcttgccttttgagtgacaagcactgagtgagactttattcagagatgagtttacgtaaaatctgctgtgctggttaaagcaaggccagccacctgggaggatgggttttgggaatcactgcatcctggcagagggacagggcaggagctggagctgggtctctctctgcccagggagtttgctggactttctcaagggggagacaggcaagtacctgcggctgcctcagctggtggacatggctgctcaggtgagtcagcccctcccgcctccccacacccttggtcctcaagcacccagacccatctggtgcagccagttctggcctcttgagtgccccctccaagaagcctgccttgattgcctccacactcactgatcttgccgcacgtatttaccaggtctgcttacaggtgccctgaggggtgattctgggcagcagaaggcccttacctgggcatcaggggtcactgacttactgtgggacctcgggcctcagttgtcgtctctgtaaaggtcatttagtcgcttagcagacgtgttcatgcttgctgtaggcagtggtcaacaagcctttttttttttcatttaatcctcatcacgaccaggagtgacgaggattggctgttattcccattggacggatgagaaaactgaggctcagagaggggacttgggcagcaggcaggacctggcactcatctgtgtctgggtccgctggggcctctttccctggtcacctcgctttcctggctgcatcggatctcgtgcctcccctttgacctttgccttctgccctctgctctgtgccctgtgctccctactcccgcagagcactgctcctgctttcgatgccaacagcatttactgtgaactgacctcacttgcctgaagaagtgtggggagggtggggaaggggtggttggctctccagccccagagtgctctgtggccctgggagggcatgggtggcacctgagccaggctcccacggttccgcctgcagatcgcctcaggcatggcgtacgtggagcggatgaactacgtccaccgggaccttcgtgcagccaacatcctggtgggagagaacctggtgtgcaaagtggcggactttgggctggctcggctcattgaagacaatgagtacacggcgcggcaaggtgggcaggggctgtgtggtatgtcgcgcttggcctgggacaggtcacgtcccgctctgagccccagttttttcctcagctgtcattcctcatggtgcttatctagcagagcggtcatgacaggaggtcagagctgccctgacctttctcgttcctgcaggtgccaaattccccatcaagtggacggctccagaagctgccctctatggccgcttcaccatcaagtcggacgtgtggtccttcgggatcctgctgactgagctcaccacaaagggacgggtgccctaccctggtaagaaggtcctcatggcctgtctgtggtccctgaatccctctgccctggtggccttgggcaagtcatgactcctgctgggcctgtttccccacccgtaaaacaaagaagttgagcgtctgatgttaggctctctcgatggtccatgctctcagcttcggggacaggacttatctatggtcactcccaacctgtcctaggcaggaagccctcgctgccctccccatcagcttcccccaccccactttcctcaccggagccgggctccccatgcctcgctctgcccacagggatggtgaaccgcgaggtgctggaccaggtggagcggggctaccggatgccctgcccgccggagtgtcccgagtccctgcacgacctcatgtgccagtgctggcggaaggagcctgaggagcggcccaccttcgagtacctgcaggccttcctggaggactacttcacgtccaccgagccccagtaccagcccggggagaacctctaggcacaggcgggcccagaccggcttctcggcttggatcctgggctgggtggcccctgtctcggggcttgccccactctgcctgcctgctgttggtcctctctctgtggggctgaattgccaggggcgaggcccttcctctttggtggcatggaaggggcttctggacctagggtggcctgagagggcggtgggtatgcgagaccagcacggtgactctgtccagctcccgctgtggccgcacgcctctccctgcactccctcctggagctctgtgggtctctggaagaggaaccaggagaagggctggggccggggctgagggtgcccttttccagcctcagcctactccgctcactgaactccttccccacttctgtgccacccccggtctatgtcgagagctggccaaagagcctttccaaagaggagcgatgggcccctggccccgcctgcctgccaccctgccccttgccatccattctggaaacacctgtaggcagaggctgccgagacagaccctctgccgctgcttccaggctgggcagcacaaggccttgcctggcctgatgatggtgggtgggtgggatgagtaccccctcaaaccctgccctccttagacctgagggacccttcgagatcatcacttccttgcccccatttcacccatggggagacagttgagagcggggatgtgacatgcccaaggccacggagcagttcagagtggaggcgggcttggaacccggtgctccctctgtcatcctcaggaaccaacaattcgtcggaggcatcatggaaagactgggacagcccaggaaacaaggggtctgaggatgcattcgagatggcagattcccactgccgctgcccgctcagcccagctgttgggaacagcatggaggcagatgtggggctgagctggggaatcagggtaaaaggtgcaggtgtggagagagaggcttcaatcggcttgtgggtgatgtttgaccttcagagccagccggctatgaaagggagcgagcccctcggctctggaggcaatcaagcagacatagaagagccaagagtccaggaggccctggtcctggcctccttccccgtactttgtcccgtggcatttcaattcctggccctgttctcctccccaagtcggcaccctttaactcatgaggagggaaaagagtgcctaagcgggggtgaaagaggacgtgttacccactgccatgcaccaggactggctgtgtaaccttgggtggcccctgctgtctctctgggctgcagagtctgccccacatgtggccatggcctctgcaactgctcagctctggtccaggccctgtggcaggacacacatggtgagcctagccctgggacatcaggagactgggctctggctctgttcggcctttgggtgtgtggtggattctccctgggcctcagtgtgcccatctgtaaaggggcagctgacagtttgtggcatcttgccaagggtccctgtgtgtgtgtatgtgtgtgcatgtgtgcgtgtctccatgtgcgtccatatttaacatgtaaaaatgtcccccccgctccgtcccccaaacatgttgtacatttcaccatggccccctcatcatagcaataacattcccactgccaggggttcttgagccagccaggccctgccagtggggaaggaggccaagcagtgcctgcctatgaaatttcaacttttcctttcatacgtctttattacccaagtcttctcccgtccattccagtcaaatctgggctcactcaccccagcgagctctcaaatccctctccaactgcctaaggccctttgtgtaaggtgtcttaatactgtcctttttttttttttaacagtgttttgtagatttcagatgactatgcagaggcctgggggacccctggctctgggccgggcctggggctccgaaattccaaggcccagacttgcggggggtgggggggtatccagaattggttgtaaatactttgcatattgtctgattaaacacaaacagacctcagaatctgatcaacagtttattgaacatctactgtgtgctggaaagcgagatggggcggaatgcgagaacaaactaccccttgaggggtctttgggcagcactagtagctggagggcttcaggccaaggcaggggtgacatcagattggagacagctacggcagaatgtggctgtttgtgaacatctgcacctgtgttagggggtgagcacctgggagaaggacaaggcacatcacaggacttccctgagcatgacaagttcaggactcaaatgtccgtggtggatggtagcagtgacattggggagtgggtggggctgtcaagcctgcctagaggagatcacaaatacacgacgagaataccgttgtgtgtgctcttcgtgtgtttcctaggagtgcagggcaggggtgctgggtcgatccacaaaagtcctgaaaacgctgaagaaaaatccaaagacccttcccctcctccctccttccccaccaccgaagcacacagtcttgaaggttgatttgcaaccgtctatacaaacacatttattttacacaaatatacatcagatcacacacctgtgcaccggagtcaactctggccacgacattgcttaattaaaaacaaatttcaaaaactggacatttttctgttcagtattattttcacaagccaaacacatcatagtgtccaggtcagggtggcatctgggtggcatctggagatcgcagggggcgggtgtgtgtgtgtgtgtgtgtgggtgtgggtgtgcgtgtgtcttaggagtagagatggagttctggatgtgaggttgtggcaggtgttctctgcttgctggtgggagtatacctggatgcgtgtgcctttgtgttcatgggggtatgtgcgtgggctctgtttgttcgcagacatggtgcttggatgtttgtgtgtgagcacttgtctaggtggtctgtgagcctgggctcatggaaatgcgtcccagatgtgtgtgcttgggcattaacgcgatgaggtgagccggtccgcttgctctggctgtgtgtgcagaatgtgtgtgtactgtgtgaacacagatccaggggcttcatgagcctgtgggctcctggagtgtgtgggcaccgaggtgtgcagctgggttcacgtggatgtgggtgggaacagcatgtgtgcccgtggacccgtgtgagcttgggctcgcacccccagcgctggccactcccggcgggacccacgtgtgcccgggggcgcagggccacgtgcgagcgcaaccgggacaaagcgctcgcccgcgctgccgcggcgggtcaggcgtgcgcatgcgcatgcgcggcgcggcagggtccaaccccaaccccgcgcgccgggacaggagggaccggccaccgcgcggcctctctcctcttccttgtccatctgagtctttctctctcttcctctctcttgtctgtcagtgcctctccagccctctctggccttacatcaatttcctgtttcttcttttttaatttttaaaaatttcagtagcttttggggttacaagtggttttttggttacttggataaattatgtaggggtgaattttgtagtacactcgtcatccgagtagcgtacgttgcacctaatatgtaggtttttaaaaatcccacaccccgccttccttgcttttttctttctttctctttccttttctttttctttatttccctttcccctccctccctccctttttttgagatggagtcttgctctgcccctagtctggagtgcagtgactcactgcaacctccacctcctgggctcaagccattctcctgcctcagcctcccgagtagatggaaccacagctgtgtgccctcatagcccggctaattttttttttttttttttgtagagacggggtgttgctatgttgcccagactggtcttgaactcctgggctcaggtgatctgccccctccggctcccaaagtgtagggattacaggtgtgagtcactatgcctggctgattttccttttctttctctatgtgtctctctgtctcactgttgctaatttctgtctcttttcctctttgcctgggtgctgtctctctttctctagtccccaccctccctttctgcctctcagatttttctccccatccacctcttcacatctctgactcttcccaggccctcccacacctccatgcctttgcccaggctgttttcaccgctgagaatgccctttcttccctctctacaacctggcaaactcctattcatcctgcaaagcacatctccgaggccacagaccggccctgggagctctccctgacgccctggaatccgcagagcgtgtcagcccgcccactagaacaagcgcttgagggactgggtgacgttctccctagtgatcccaggtcccgccacattggtaatgtctgctcagggaaggcaggcgggaaagtcgctctgcctctcccactcctgtctctggctccttctccggttgggacttcctcactctgggcctgtgtccagttggcttgtgctggactcggtgtgtaagggagacagagatagacacacagagatggagtgcagaggcgagagatgtcatccactctgctgggccacagtctcctggccccgctgtcccctccttcggccctgtgtagtgtccaggtgtctcccggggatatgagaccccagggctccatgccccctcagcctttcctttctgccttcagttggttttactcttaattctgcatgcatttttttctttttgagaaaactaaaatgtttcccccatgacaaaaaaagaatatatattctttctggcaaaataggaaagatacaggaaaacacaaaccaaccaaccaaccatatttcacaccccctgctccacccctcccgcctggagtctggggcatgtctccagggtgcatgcagggtgtgtgtggtgtgtggtgtgtggtgtgtgtaggggtgtgcggcatatgcgtgtccctgctgctgttgcctcccaggctttttcctatgagcttcgaaagtctctttgttcatcctctgcttctctcgtcccctctcttcctccctccctagttacattctccagaccagacttcatgctgggtgcacgcatgcacagacacacacacacacgcgcgcatacacatgcacacacacacacacacacgcacactctgcattttctatcatctctgtcttcttttcccatttttctctcagaggctctgaaacgctgtgattcatagagagaaaaagagacaggcagagattcagagattcagacaggacagacaggaaaaggggatggagacagaggggctggagttggtggcggggagggagcggcagggagagaagctttttgtccatctgtttgtcgtctgtgaggtccatcccgattctcactccccgcagccctcccctttctggggcttttcccacccagcccttggagcgtgtctcctgggatcctggggccgtgtccatctgtccgtctgtgtgtcagcctctgcctcccgcctgcctcttgctgtggtctcattaaatgctcatctctttctttgattgttccacccccaggttgtgtgtgtgggcacgtgtgcatgtgtccatgtatccagatctctgtgcctttgtggctgtccatctgcctcccacctgacttccccttctccctccctcctgttcttgccaccgtgtcagtgtgtgtttgcatctgtgtacgtgtatgcacctgtgtacatgtgtgtctgtgcatgaatctcttgctcacctcacttcccctgtcccagaggctcctggacttggcatctgggggtgttcttctcctcactccccatcctggtccagcctcagcctcaaggcttgcctcctggacaatttccctggcaaccatccctggacatcttacctgcaacctccgaaaactcaactcacttgtccactcccactccgtcagcagggggacctctggcacagagccacatgccctgggtggctcagccttctctcacttaacgctctgctgtgggctttcatttcctcttaccacttctggccccactcagagccctgtgtctcccccacctgcctgtgcacaggctgacctgtgtcatcctgatccccaccatgcaggcattgctcatggtgcctctgcctgacatctttcctttcttttttttttttgagacagagtctcactctgttgtccgggctggagtgcagtggcgcaatcttggctcactgcaacctctgcctcccgggttcatacgattctcctgcctcagcctcccgagtagctgggactacgggagtgcgccactatacccagctaatctttgtatttttagtagagacagggtttcaccatgttggttggccaggacggtcttgatcttttgacctcatgatctgcccgcctaagcctcccaaagtgctgggattacaggcatgagccattgtacctggccgacatctttcctttcttcagcctgcaaatcccacctcctctgggaagccctcttgataaccccctttgctgggttcccttgtctctgatactccctgcagtgagatctgtcctggccttggtcttatcgcaggctgggcacccagctggagtcccatttggaccttcgtgggcctagacaccttggccctttccttagaaaagaaaattaaaaattacatgttacgatagcactggtatcaacacgaatatattaataggacatactgagacattttctttgagttaaaagttcgtttttcttctgattttaaaagaaattggaacattttcttggggtcccaaaagtatggtgcatgggctatagattcactgatcccctcctcttgccaggcctgggcgaatgccatgccgggcaggctgtgtatgctccccgccttctaccctctctgtgtctgtcttcttcattttgcctctgcagtttgtccttgtgttagtgcattaaagcaagacgatgcgtgtgtgtgtatgtgtgtgtgcatgtgtgcatgcacacgcacgccacatcctccctcttcatctctgtgtccatctctctgtgtttgtttgtttgtttggtttttttttttgagacagggtcttgctctgtctcccaggctggaatgcagcggtgcaatcacggcttactgcagcctcaacctcctgggctcaagtgatcctcctacctcagcctcctgagtagctgggactacaggcgtgcacaaccatgcccggctattttttttttttttttagtagaaacagggtctcactctgttgctcaggctggtcttgaactcctgggctcaagagatccgcccacctcagcctcctaaagtgctggaatcacaggcatgagccactgtgcctggcttatgttcatctctttcaccataacaggtttgtctctttctccggggtcccctcattcattcattcattcattcctgcaacaaacacctgtgtgtgtccctgtgtctgtgcgttggcgtgtctgccagggagcaggggtcttggttcctcatctttccccaggtctcctgctctcccagatctgcaggctgtgagctttccagggtgggccatgctccctgctcccgaccctttgcctgcccgcctccccttgctccagcattggggtcactgctatgggtggtggttgttttccctctcccccttggttcttcctagaacaccatgtagcagctgctcctgcccagcagggtgtgtgtgtgtgtgtgtgtgtgtgtgtgtgtgtgtgtgtatgggagggagtgagagagagggccaggccgacatatagacagacagacaccaagagagggtgacaagtgcacagccggcacctgtctctcctgtatttgccttctgtctccttccctctcctctctgaggttttgctggcattttgtcttttctctgggcttcctgcatttgtgtgtgtgagtgtgtctgtgtatgagtgtgtgtgtgcacgtggcatgctcaggtctgggtccccccttcctcaccctccctttgtcccccccaatccccacaccttctctaccacagtccaggtgtgagtgtggtctgcggtgtgtgtggtgtgtgatgcgtgtgttgcatggttgtgtattgcatggtttgggtggtgtggatgtggtacagtgtgtgtgcagcacggcctgtgtgtggtgtggccgtggcctgcggtcccttgcggttgcctgcatccagcgacggctgtgctgatgcccctcccacccatcgaggcctctcctcctttctttttcccttcccttaccttcccttcccttcccttccctcccctcccttcccttcccttccccccttcctttcctttcctttcacttgctccttcgtaaaatcctgattgagccattcccatgaggcagccctggtggccggggcacacttctctcactgggtcgttctctttctccttttctctctctcttttcctgtctttggctccgtttctgtgtctgtttttctccctctgtcttttgttttgtttctctgttgtctgagtctttgtctctttgtttctatctttgcctgttggttttagcctagcccactcaggcactaattagttgttcccgttaggaagtggctgcaaagtcgtgtatgtgtgtgtgtggggtgtgtgtgtaagtgtgcatgtgagtgtatgtgcctgtgtgagtgtacatgtgtatgtgtatgtgagtgtgtatgtattgtgtatatgtgtgcatgtgagtgtatgtacctgagtgtgcgtgtgagtgcatgtgtgtgtgtatgtgtgtacatgactgtgtgtttatgtgtgtgagtgtgtgtatgtgtgcgtcttgtgaatgtgtatgaatgagtgtgtgtgtgttcttgctctctttccaacagttttggccatgactccacctcccattcatttcctaagcgcccccctacacacacacactcacagggtcctcccaggcgtgagtatgtgtatgtgcagctaacaggtctggctcctcattgttccccgaggctcttgcctaccgtggctgcaggctggtgggattccggcgtgggcagcagctgcctccccttgctccagcgttggggtcgctgccatcggctgagggtttgtttctttcactttcacagctcttcccaaaacactcgtctcggagcagctgctcccgcctgtgtgtgtgtgtgtgtgtgtgtgagagagagagagagagagaatgtgcatgtgtgtgtgtgtgtgtgtgtgtgtgtgtgtgtgtggagggtcacagcagcccctccctggccccctttctgcagggcttggcttttgtgttcattctgagtcccttgcacttgtccctcagttcaatcaacacctctacatctctcctgtgtactgggctgtgtgtgtgtgtgtgtgtgtctccacttctccctccttcccacctgttctcgccagtctctaaggcactctgaaatctgccctggctgtatgtgtgtgggttcacagggcgaggtctgtgcacgtgaaccagtatgtgacaagctgtcagggcatcatctctgccactgtacctaatccttcactctcaccctggggtaatttcctttgtactttcctttggtccacacatgcagaacagctcttgtgagttgtgcacacaggtgtgtgtgtgtgtgtgcgcgcgcgcgcgtgtgtgtgtggtgtagggggagagacagagagacagatctcctcttccctttgctctctctggctgcatcttgacctttgcacacctgcccggatccatctctctctccacttctcctaaacctctccttgtctctttctgcatcatctctgaggctttgctttccctctgcagatgagagagggtgctctgtccatccatccatctatccatctgtctgtctgtccaagagttatttgtgggcccttttctacctccccacccctttcctgggcctgcactcttgtcacccgcccccctgcaccctcctgcggggccatttcagcgcccaccctcttcacctctccatctccatccctccccgcttgtgggttctggaccgggacctgagaacaaagctgcctcctgggccccacacccatcacccggccccaaacccttcaaggcccgttgggcttggcatcctgtttggctccttccctcatcagggggcctcatgcagcctcactccacttccagcaggtcacccctgccgggccattcccctgccactctcttatgcccccctctagctcaaggcgatttccttcctgccttataaatcccctacccccaattcaggtctcccaggggcctctccttttccatgtgggggtctaggagtcggtctttctctcctggtcaggttccattttatttcctttttcctctgacttggtcgggttttgttcttccctgggcatcactggtacctgtgtgtgtgtgtctgttcctgtctccctgtctgacgcattcacctttccttccaccttttatcctcttcctctcatttcaaagaattgggatctaacttacatatcgtaagatgcacaaatctgaaatgaaaagctttgatgaatttcacatgtgtctgcacctgtgcctccaccacccggagcaagaaacagaccgtcctggccctcgagtgcaggctccctcccacccgccccttgaggctcggggtgtttctcactgtgtgtatgcgtgacattttgtctgtctgtctatcctgcaactttctcagctgttgcttccctctgggagccccttgtctttgttcctgcgctccatcagcggttattgaacacctcctaagacgggctccgcgtgtgcctacctccctcccctactaccctccctgcctgctctctcccgctccgctccctctccaagttgttattgaattctgcttctattctgtgcgtccctgtaggagtgtgtgtgtgtgtgtgtgtgtgcgcgcgtctccccgattgcccaccacctcccccctcgctctccttcccccacctctgccttcctccctttctctcccactcctgggggctccatcgagattgttccagggtagcccagccccgtgtctctctctggctcttccacccctccttcctcccctcgctgtctctgagggatgggcgcaggctggctctcaccctgggcatgtgccggcctgtccgtctccatgccagctctggccgcctcctcctgcccctggcatccccccattcccttctgccaactccctttgctccacacataagctgccaacatcggggtctctagccaggatctccgagccgagcccagacctgtccactcatcacggtccatctcttccgctgcagagcaacccccagcccccttcaagcccctaccccatccctcccctccacatcctgagctgtcttgctgtccgtacctccttctcactcactccagctgcgatttgtgcctgacctcccgcatggctctcaccagcacctcgcctacctccctgcagacatgaccttgtcctcatcttcctcaacttctctggcatctgactgtagacacattggtcccctaagcctgccctgcttccagaggactccttctccgagccttggccttctaacatactgttgttccttgtcctcttctcccttcccaccacgcctggtgactgtccccactctggggctcagctccccctttgtagggaccaccccacctccatcccctgagttccagccctccctgcatacaaccttccggacattccatgggcacctcacgatggactcacacacccctctttgccaaagcctggggtgtcccgcctcatatgcccactacctggcagcacccagctcagaccctgggctggtccgcttcccctccccgcccacgtccggtccatgtggtcccccaatgggtctcgccccgtcccttccccagcaccttgccttgggattcatgtcccctcctgggctgtgctctagtcccctccttggagtctctgtcacctgtcacctcctgcagtgcagcagcccgtgcagtgctctggcctgcacttggctcacagcaggcaaatttggtcgtgcctttggtagatgctccctgacccagcacccacagggggcggacttagggatacggaggcagatccgcggccctggtccctggtctggtggggagactccagtggagtgtgctgggccgcgggccgtaggctcatacgctcctcctcagctgtgacttctctcttctagtgaacccctctctttcctcctgcctcctgttgtcccacccaactctttccactgcagtggggtgtttcggcctgtctgagggagggtctgcgggcctgtccccgtctgtctgtctgtctctgtctgtcagcgctgcgtatctggtctgcctgtccctctgtcttcgtgtctgtgagagatgtgtgtgtgtgtgcattctgctgttgggcagtcctggcgtctgatttgtgcgtgtgtgtgtttcttgtgttggggtgtgtgtgtggtggtctgtgtgtcctggagtgggtttctggctggccggttttgccggtgtggagggaggcctgcagcatggcagctgtctgtagggggctgtctgtgtgtctgtctcggtgtatggggctgctggccagtcctgcctgggtgcagagatgagttgggggaactccctgagtgcaggggtctgtctgggtgataccatccatgtgtccttccttccctctctgggggctctggaggcatcacgactcccctctctctgtccgtctccccctcgtcttccctgagtcccctcctggaggctttgtcaggatctgcttgtcactgccttgcctggcacgaggcctgcgtcacagagcgcagctgagaccctctccctgcgtgggcctggtgtgtgcatcatctgggagcccctggcggtgtagggagccttgcctcgccgctccgagctctccagcccctctctctctccctctgagcctttctggagctttcttccccttcccgcgtgcgtcaggcctctgtctgtgccgtggagctcccaccctcgcccctctggtggccttcctgctgctgagtgagtttgtctggaactttcaaggtgtacctgagccctgcacccacaaactcctacggggcagggctgggcagagccaggcagggccctgacatgttcctcagtcctcaccagagccccgattccctccaggagccttaccttttggaagcggatccaaggccctcacccgaccttcagggaaggccctttggctctagcctgcgccctcctcggccgcccacagaccccgccactttttgtgctgcagttgccctgccgtttctgtgccttcgatacacaggctgttcccgctgcctggactgcccatccccagagaggcccttcctggccacaccatctgaatgcgtctctgtcactctatttccccttacgctgctgtttgtctttataacactgatcactccctgccatcttcttacacgttgatttctggcttagtttcagtctctcacgctatcatctctgccactatgctgtaagccccatgagggcaggcccatgtctgtgtcgtccagtgttgcgtctccagctcctagaacagcgcctggcatgtagaaggggcttgattgaatgaacaatctcatttctgagctctgtctggccaggatgcagtggaaatccctccccgcattcacccagtccccagggaggccacacccagctccgtcctccccttcccagtgtgcacatggagcccgtggctgcctctcaagcacttctggccatgtgtccctggctgcttcaacccttcctgggctccctccatcccgcgggcgccgtccaggcgttagcctgggcgtcaaacccttgcatgcttcaacccccattgcctctcaagcctcaccccttctctgtcacccccacaccagccaccggccacccagatggcctgtcatctcagacaccaccccgccctcacacacattctcacccctcctggcccttgcaaactctctgtgtgaggtgtcccttcccaacctgccccggtgatcgggcatctggctccaagtcacctccccctgcagactgggggactgtccccgccttcccctccccgtgcctcccacccctaagcagagtccgtgtctcccctgccaccgtggcttcctgagggaaggggcttccaggagcactcctgccgcaccgtgtgctgatggtgtcccatctgtccgtcaggccaggccgtgagccactcggctctgagtcccctgggcccaggagcggcttccccccaggcggctatagagagggactctggaggatgagaggaggggtcctgtgtcctggcccctcggcccctcctcctctccctctctgtcttcctgctcctcttctgagtgtcccacgcccagtttcctccctactgtgtgtgtctgactgtctttctgcaacgccttcccccactggagcattagtgcttcattgctccttttgggcatcaaatactttgccctgtgtgtgtgtcacagtgccccccagtgccctctctcagtcagtctgtctgtctgtccatccgtctatctcatcacactgtactctttgctttctctctgccctagccctggaggtcattgtcattctttgagcatgtgagacacacacacacacacacacacacacacaaaacaccaaacccccgcctggccccctctctgtggggtctggcttttgtgctcattctgtgagtcaccgcatccactccctccttcaggcagcacccctcgagtcgctcccgtgtgctggccgggcacgtgtgtgtgtgtgcatgtgtgagtgtgtgcatgtgtgtgtgtgtgcgtgtctgtgtttctctggctcttcccctgcctccagcctgttctctgtctctaaggcgttactgaaatctgccctggctgtcagagagacagaggttgggagggaaggaagggaggtggtgggcagcttcccagtgcctgctactcactgcccgctcccgttcttctctggctgtctctctctctgtctctcagcctctctgtctgtctctctccatctctcagcctctctctgtctctctccatttctcagcatctctctgtctctctccatctctcagtctctgtctctctccatctctcagcctctctttttctctctccatctctcagtctctttctgtctctctccatctctcagtctctctctgtctctctccatctctcagcatctctctgtctctctccatctctcagtctctctctgtctctctccatctctcagactctctctgtctctctctttgtctctcagcctctctctctgtctctctctgctcctgttcttctctccctctctctccatctcttggcctctctcctcccttctcaatttttccagatgtgccatgtctgactctgctcatgccacgtatttcccttcctcctcctctcttaggctccgtcttctcccacttcttctggactcctgtgcatctgtgtgtgtctgtgtgtgtgtctctgagtgtgtatctgtgtgtgtgtctgtgagcatgtgtgtttgtgtgtctgtgtgtatctctgtgtctgtgtgtctgtgtatttctgtgtatgtgtctctgtgtgtgtctctgagtgtgtatctttgtgtgtctgtgtgtgtctgtgtgtgtctgagtgtgtgtgtctctgagtgtgtatctctgtgtgtccgtgagtgtgtatttccgtgtgtctctgtgtatctctgtgtgtgtctgtgtgtgtgtatttctgtgtgtctctgtgtatctgtgtgtctgtatgtgcgtctgcgtgtgtatcctgtgtgtgtgtctctatgtatgtctctgagtatctctgtgtgtctgtgagtgtgtgtgtgtctctgagtgtgtatctctgtgtcggagtgtgtgtctgtgtgtgttctggagtatgtgtctctgtggtctgtgtctctgagtgtgtgtctgtttctgtgtgtgtctgtgtgtctgtgagtgtgtctctatgtgtccgtgtgtgtgtgtctgtgactgtgtgtatgtctgtgtgtgtctctgagtgtgtgtctgtgtgtgtctatgtgtgtctgtgtgtgtgtatctgtgtgtgtctatgtgtctgtgaatgtgtctatgtgtgtctgtgtgtgtctctgagtgtgtctgtgtgtatgtgtgtgtgtctgtgtgtctctgagtgtttgtgtctatgtgtgtctgtgagtgtgtctctttcccctccctctgcctacccctaccctgctgggggccctgggaggggggggtccatcctggggtcttgccctctcactgctgcctccagctgggtctcactgctcctggagctccatcctgagggatccccacatcccccatgtttcccaggaggccacagagctaaacccaccctctggtcacacctggtccctggttccagagctggaggttcccaccctcagcccactcgcccaggccagggctggcctgcccctcccccatccacaaaccatcatgaggactcctgaactcccctccacacccccgacagctctcaatccccacctccctctctacgggtaccccaactctccctggaaggaccctgctggcttcctctgtggcctctgcttccgctcccatcagggtcagaaacccagagcagtgcctgtcccaagtcctccagatgcccacgcccaggccccgtctggcccctgccttctctgtcctctgtcctctgtctctgccgctatctgtctccgtgtctcacaccaggatattctgctcctccaagcctttgtccttgtgctcagcctttgtcctctgcctggtgacccggccctctttcccccatgccttcttccccctctggcaaactcttcttccttccccagggccccgctttgtgctcctgggctctgggaccttcctctgggagaccctttccctgcccggcctccaggtcagcccagacttgcccccagatcgaggtagtttcaaggggaaccggctgcagcccaacctaaccctggaagcctgcacacagcagcaggtcgccccaaacacaccccagtctccttctcagtgggtgccagcctgtttggggtttggggctcagtgccttggaggcctaccccaccttgccagcccctcctcgttccttgcccacagcctccctgctcctccttccccatgtgcaaacacatgtgtatgtatatgtgtgtatgtatgtgtatgcatgagtgtgtatgcacgtgtgcgcacacctgtgtgcgtgtgcatgcgtgtgcatgcacgcatgtgtgtatgtatgtgtatgcgtgagtgtgtatgcacgtgtgtatgtgtgtgtatgcatgtgtatgcaagcgtatgtgtgcatgttgatgtgtgtatatatgtgcgtgtgtgcatgtgtgcatattgtgtgtgtatgcgtgtgcgtctgatggcctcccctcactgttctctgtaacttcatctccattcactccctctgcgacagttttgtttctttatcttctttcttcttcccagccatgcgttttttttcccgattgcaaaggtaatgctccatcttcatgacaggatgtttagaaaatacagagaaaacaatcgaagcctctgtgggttccgtttcccaagaagagaggcctctgggtgtaggttgggaagtggcccccacgttggtctgtagcccgggcccccatgcacaggtgtgcataccttgcacactcttgtccgccccttcttcccttgggctctgcctggccctctctctgttcctctcagggactctgcctttctcagtctgtcaccgtctctctggtctgtctctgagcccctctgtctctgggcgccttcctccgtctccgttctgccctcaccctggggattcccacacacatccactttcattcattcacaaaccccactctgcagacgccgggccacactgtgtgtgtctgtgggagagcgtgcctcctgctgtctctgaaggttccttggattttgtccctacctgtgggagctcctggggtgcatatggggggcggggtatccacacatctggctccctggacaccttctgcctgtgtgtgcgcttgtctttctgccgcctccctttctctgcaccttcgtgaactgccatcttgcccttcactgcatcctctgtgtgtgtgtgtgtgtgtgtgtgcgcgcgcgcgtgtgtgtgtccctccactcacttttgtctccctcgcctcctctctgtggtttcttcatagttcgctctccctctattcccccgggtcacccccattcatcatttcttttgctcattcaaagatggagcatcatttctttctaaattatctgccgtgagcacagagagctttattacctttgtaataaaaaaaaaaccatgaacattgcacccaccacccacaggagtaacagggtgctggtgcctattgctcgtgtccctttgaggtgtgcctgtgcgggggtgagtgagtgtgtctgtctgtccttccacctccaggcttcctggctgcctctccttcctcctcttctccaccctttttcctggagatttctggaatttcactctcgccgctcctgctgtgagcctgaagaaggggctgtgtgtgtgtgtgtgtgtgtgtgtgtggtgtgtgtgtgagtgtgggcgctgagggttgtgtgtgtgtggtgggtgggtgtgagccaggctgcatgtactcccgccttccctcaccgcctctgcagccctgccagcttttgttcccctctgcgaacatttcctttctttcagaaatgacatttattgttttcctttggtttcagatgtcatatgtgttccctgtagaaaaggtggaaaataccaaaaagaatgtgcagaggaagacaaataaaaatccctgtgctcccaactcccagggagagaggagccgtcgccgacattttggggagcttttcattatctttgccttgtgtctgtgcactgtttttctcgctttttctttgcagattctaccccactctctactctcttattcattccttcagaaacatttgggggtccccacttggggcacccctgtgtgtcttcgtcagcccatctgaatgtctttgttgggaaggtccgtctgtttgagggtctcctacctctctcccttcgtgtgggtgtgagtgcgtgtgtgtgtgtgtgtgtggggggggggaagcagctagaaagaaatagttggggggagagagagacagaaagagaccctgcgtcctccgcccttcctccctcctccttcctcctctgcccgcttcgggatgcagggataactgtgctaggtgcctgcctgtggcccccagtcccttttcctgtccccatccctttgtctttgggttcctaaaggatggcacagagcctccaggagcggagtggggcggtgtaggcagaggacacagctcctagcagcaagtggaagcaggaaacggttctgtttccaggagctttcctcatgtggcccgggagatgagggggtaggggaccaggggactggccacggaggagcttccctcttgctctaccctcataggggctgggaagtgggccgtgccgtgggagcaccaattacctgttgtcagcacgcagtgggacccctgcttgacccctggcttctgccacccaagccggagtgtcctgcttcctgccattctgaaccccaaacatctccctgaggtcctgtctcctccttgcccccttgccctggcctgggctttgtcattgcaggcctggattctgcctgggacccctccactagcctgcagtgacttcacagtgtggctgagaggccctggggggtgggggtgggaatggtcaccagagggatggagtggcccataagagtcccatactgtcatgaggttcccagcctaaactctgaccccgaactagctgtaccccgtctctgcctcagtttctccccaaggcctccagctcagtacagggcaggaggacatcagagaggggcatggagtgtggatttggagcaggtaggtctgagtctccctccagggtcgctgctttcatcctcacccttgagcgtcagtttcctcctctctgacatggagctgccactagcttctcttccaaaggctgtgcacctggccagtgccaggaacgttttctccgatggcactacagtcattcttatcactggcgatggcgcccccagcccctctcctggcgcacaggagggctccctggctggcatttgaatgagtgactcagagagacttggagagcaggcctgaccaaggcaggtggacagagggacagatgtgtgaacacacacaggcgtgcgggcaccacacgcacagcagcactcacccatggattggaaggaaatggaatttaattctagagacaggcactgagaaacagaagacaaaagttgtggggttgggggccaggagaaagaccctccaggggcagacctggagcccaacacaaagactgggactcagcacacagcctgccctggagggctttagggtctgcaccaacgtgccggccaccagctgcgcgagaggggaatggaacacagactccaggaggacagaggtggggagagagacagagagggagagagagagacagagaaatggagagggagatggagaggcacagagagagaatgggagggagggagagacagagagggagggagagagagatggagagagagcagggaggagagagagagggagggagagacagagggggagagagaaatggagagggcaacagagagacacacagagagacatggagagagggagggagagagacagacagagacagagagatgaagagacacagagggaaacagaggaagagatgcagaaacccagagcataacagtaacccggagagagacagagagacagagagatatagagagacagagagagacagagggagagataaagggaggcaaaaaggcagagagacccagggagagacagagatgcccagagagacagcaagagtccagaagggtgcagagtaaggggtgatgtgggagacagagggagccaggaaggagaaggagctgaggagggaggcgtgtccagtggggacttgagggtgagaaagtgccctgaggggaggtcttggctgtgggaagagcctgggccaatgccaggaaagctgctgttgccctgttttagcagacattaggaattctggactttactgcatggcccgtagggagctagtgaaggttatagagcaagggggtgatctgtcacagttggggagtttgataatgtgccctctggcagcaaggaagaagaaggaaggtgcagaggctgtgaggggctgcggtggcagtagggaagaaggaaagaggttggtccacgcaggtgtggctcctccgagatgtttaataggtactcagggaataagcatgggagacaaactatggagggctgcgggtggtgaggatggggaagggaaggctggtcaggatcactggggacatgagtggccttccccagctttgacactttgctatggctgtcccctcggtctgggatgcaccctccttccctcctcctcccctttacccagctcccttcttctcacagcaccccttcctgtcaccccacaagtgggcatcctgccttggggctcccatgacccctgggcaccacctcattgttgctgctgttcccatcttctcttgtaattatttgtctctctgtacctgcctcgtacccaggccaggggtggcggagggtgggcctggcactccagttctctctggagattttcctcgcctgcctagcatggggctgagtgcactcagtggatcctgggagcagctggaagaaggaacacaccttctttctccacctggctaacttctatgcatccttcgaggccctgctcaaatggcccttccttccgaagcctttcctgcttcccctttagaaagtggcttccactccgggctctctcataacaagcctcagtcacatcatgggtctctttgtgtccgtctgcctttctcaaggctattggtgctcaaggacaaaacaagacggaacagaagagcagcagccatgaatccttacacagcgctcaccacatgctggaaactgtcctaagcaccttccgtgggcttttcatttaatccttacgggacaagtatagaccctatgattatttcctttcacggatggtgaaaccaaggctcagagaggtgaaaagacttgtcccaggtcacacggcaagtaagtagtgaaggtaggatttgaacccaggctgtctggctccagaatcaccctgtaaggtggtgtgaggtggtatgtgtcaagcatttctctctcagtgtaaagggccctggaatctttctcttttctgcagtttctgtcctgtcctgggctccctgtaccctgtccaccttctgcaccttctcactgggaagcccattccctacccacagtgctgaccctcagagtccctccctgccattcgccttgatgaaggcacaaggccggcacctgctggcccctccaccgatgcctcaagcccactgcctgtcgttacagtcctcaaatgtgtttttctcctgttctcattagcgctgggcgtcaccacccaccggggctgcagccaggagcccggactcatctctgactcttccagtggcctgccgcccaccacccatctgtgcccatttcctgccgactgtcctccggggcccctttcctgggccaccaccttcggtctcaccctccacttcttactgaaacacctgttaccttcctaagtccccgtgtccgttaacgaagctggtgacgacatgttcctcatggagtatctcgaggattaggcaaataccgaaaagctgttgcggcagggccaggtttgcaatccgtagctgtaattaaagattaaacgggtagctgtgactaaagattttctgaatgaatgaatgagtgaacgaccccatgggtatgccattttcttttccttatattcctctcagattccccgtcccccacactccttgtctctagggcacaatttttactatttttgaatgatggctgccctttggaaatgccctgggtctcctgagccagcctgcaagcctctctggtcttagaaaaagatccttcccgtgactccatctctcttccagctacagctccattcctttcctttcctttcttcctagaaaacctctgggaaagaattgcactcccgccaccaccactagccccatttcctccacccactcccatcagccccttcccctgatgcctctgccctggtcaagctcataggtggcccccatgctgccaaatttcatggacattttaaatgttagtttttctcttcctctgactcttggcagcatttcagcactttctgggatgtccctcctgcatttctcctcatgtcctccaatgaccagcccctggagaaccccttgtagaggttgttgaaatgttggtgagcccctggctcaatgtctgcttatcttctctttctcggtctctgtttctctcctcacttccttgggaatcctgattcacccagtcctatgacttgaaaaaccagcaagacttgtgttgatgattcctagcttgggcctgagccccaggcatggatgtccagctgccccgtggccatctccatgtgtcagtctgtggccactcaaacgtcacatgctccaaatgagcccctgacttcaatcctccaagctgggcctctgcctggctgccctcacttcaggacctggcacagctaccactcaagtctaaaataatagctgggcatggtggtgggcacctgtaatcccagctacttgggaggctgaagtgggaggatcgcttgaggtggagaggcagaggttgcagtgagccaagatcgtgccactgtactccagcctgggcggcagagcgagaccctgtatctcacacacatacacacacacacacacacgtctaaaacaagggtctctccagacatgccaccctctctcatcctcagggttgcatccccagccctcctcatgactccttttcccctcttttcctcactgtttcaataaccacacaaatactgatgattccagggtctctatctcttgcctaacttttatcctgagcctctgattagccatttcctggaggtttctaccccgaggtccctcaggcacctactgctccacctggaccaagtggactcagcgtcatcccctacacatgctccttctctgtctggggtccttgtgctggtaaagaagactgccatgtgccctaccatggagggcaccccacatcactcttaattctgtgttgtttacttccactagtacttctcattggggtggtcatttgccaagcccttcttgtgtcccctcaatcactgtttgtttcttggttctctgtcttctctattctgaattctgtggccattcttgataacttcaatgccaacatggatggcgtagccaacactgtgatctggacctcccaggtgcccaaaatattgtcctttgttcaactgcagctatgatcacatctttggtcttgccatacaatgacagtgccaactctgaaatctcaattttgagccatcccactccccagcattcatctgctgccattccacctcatttgcttgagcacgtctttgatcaaaacaagactttggaagtcaatccccaactattctttctttagcccctctaattagccttccatccccactttgctgctggcattgctcttggcaggatcaacagtgacctccatcttgtcctatccagcggtcactcctcaggcctcgtcttctttgtcccatcagcagtgcctgatgaggttgatcacttcttcagtctcaaaacattcactcgtcttggccttcacgatacgacactcttgtacttttccttctcagtctctgttgctggatcctgttgcttccccaacctctaaatggcccccttctcttttgtacccacaccctctcctgatctctatcagctcactgggttgaaacaccatctatttgctgacgacttcctaactccagctctccctgaactcgactccactgcccattccacatctcaacttggatgtccaggaggcatctcaaactcactatgtccaaagcagaactcattccatcttcccacaaacttgctccttccccagtctttcccacatcagtaactgacaccactctaagaccgtagaagtcattctggagccccctgttcttccatgactcatatccatgtttaatccactggtaagtactgacttaactcccaaagctccccacatccattccatgtttttcaccctagctgccccatgctaactcaagcccccatcattcctctgggacaccagcccagcctcctctgtgggctccctgtttttactcctgtttccaactcattctccatctagaaccagagggatcttgtaaacaggatcatgccacctcctgctcataacatccaagttttgtgccatagtctacaaaatctgacatgatgtgaccctgatcccagctctggcttcatttcctgcattgcttccctcccactttcttggttccagccccgttgacctgcttgctctcccccagacacaccaagctcattcctgtcttagggctcagcctgcagttccttcagactggaagactttcctcccaggaatccacaaggctatgtccttccttcttgtcactcagtgctaggttcagatgccacctcctcaggatggcctttcctgaccatcccccggactcagtctcaccagcctactttatcctcttcttcactcttatcattatctgaaatgatctcattaatttactcctcctttctttctgtcttttgtactggagggtcagttccgggacagccgggactgggtctggtctgctccctgctgtaatttggtcattcagcactgtctggcatgcagtaggagctctgtcaattcttgtgggttacaggcatggctcaggtcctttcaggttggttccttaacagctctcacctctgtgccctccactcacctctctgcctccctgacttgctctctgagctcccttcctccttgtctcttggcttcagggttctcactctgagcccgcacaagtttggcctcccctttgtgagtgcatcatcgtgtgtgtgtgtgtgtgtgtgagtgtgtgaatgcacacccatgtctgtgcctgtctgtgtcactgtgggtcttatttctgtttctctctcacatagtgggctttgatataacttctggtttgcctcattcattcatttgttaatttattactttattcagttattccatctttaaatatcttgtggtggatgctatgctagacagtgtagatgtgtgatatgtgtgtgtggacacatctgtgaatctctcatattctggacccttatcatgtgttgttctcactcgatattagccaaaaggctgagaagcaatcaggttttgttctcatctctggattattccatccatccattcacacacccaccccctatccatccacccatcctcctctccacccacctactcactcacctatccatccacccatccactcatccaaccacccatccattcattcacttccatttatccatccatccatccacccactcactcatccactcatccatcaacccatccactcatccattcacccatccattcattcactcctccatttattcatctgtctctccacccactcatccatcaacccatccattcattcactttcatgtatccatccatccatccatccacccacccactcactcatccattcatccatccacccacccatccactcatccattcacccatccattcatccactcttccatttatccatccatctatccatcaatccatccacccgcccatccatccatctaaaatattctgtgccagtcagtgagaggtgagtttgtgcctgtatctgtagggtgcctgtatccatgtccctgctgtgtgtctgagggtcccatctcccttccctcaatgcctgggtttttatctccttccaaagccacattttccctttctctttacagagaagccttgttgggtttttgctctgagtctgcaagccattcatgctgtgtgtgtgtgtgtgtgtgtgtgtgtgtgtgtgtacatctgtcagtctctcacttctttccccctgggacttgggatgggcggttcctggtctctgggtcactgtcatttacaccttttccatctatttgttgattcatccacaagaggttgattaaacacctgcttcatgtcaggacctgggctgctccattgtgtacgtgtgtgcatgtgtgaatgcatgctgtctgccatccctgcctttgtctccttctcatcctcttcttccacctgccttcacatcttggggccccggtgcatgtcctgagctccaccctcctcctctgcaccaccttgccctgcccttggtgctgacggccccaagggccaggttgccctcatgctcacaagttggatactcaaagccaatcctcagctgtctttggtatcacaaactcagtggatgacaaactcaccacatcatttccgcacccctgatgtgtttctctccctgttctcgttagcgctgagtgtcattgcctgcctgggtccacagccaggagccccaagtcatctatgagtcctcactctcctgccgcccacagcccatctgttcttcctgtataatctttccccaaaagctgctcagcaccccccaacccccaccatcttatcagcccctgccacagccctggcctagaaaattgaagcctggaccactgtacccatccatccatccatctgtccatccactcatcacccacccatccattaatagacttgcactgagtacacactgggtccctgctgagcacacaggccccaaaggcaggagctcagagtccagaggggtgacagaatagttgtcactgcccttcaagatgggtgatggagacttcccaaggctttatgtcccttttgtcatcacacagtgtgtttgggggagtgatctctctctttttttttcagacagggtctggctctgtcacccaggcttgagtgcagtggcataatcacggctcactggaacctctgcctccccagctcaagcagtcctcctacctaagcctcccgagtagctaggactacaggcacatgaaccaatgccctgccaatttttgtatttttggtagagacggggtttcgccatgttgcccaggctggtcttgaacccctgagctcaagcaatcctcccacctcggcctcccaaagtgctaggattacaggcgtgagccactgcacctagccggcatctgtcttacttatcactttttcatacctccttcctccatccaaccctccaccagggctgtgtcctcccgctttggcccaggtccttccatgattagtgtgcctgcaccatgctgtccctgaccagggctgcagagatgcgcttcacgcagacggtgctcatgtacgtccacccagcaggggctggatctgttctgctctgtgccgtaatttggtcattcagcactgtctggcatgcagtaggcgctctgtcaattcttgtgggttacaggcatggctcaggtcctttcaggttggttccttaatagctctcacctctgtgccctccactcacctctctgcctccctgacttgccctctgagctcccttcttccttgtctcttggcttcagggttctctctctgagcccacacaggtttggcctcccctttgtgagtgcatcatcgtgtgtgtgtgtgtgtgtgtgtgaatgcacacccatgtctgtgcctgtgtcactgtgggtcatatttctgtttctctctcacatagtgggctttgatataacttctggtttgcctcattcatttattcatttgttaatttattactttattcagttattccattttaaaatattttgtggtagatgctatactagacaaatccactcagatgctcagcaacaacacagacttggcaagatagcatcaaaccccttaacatccccactccccttccttgttcccacccccatctctgagaccaaaaacccagacaccttctcttcctccttggatggggaagagatatccatcttcaatttgactctaatttcttgccaattcttcctctaacatctctcccctgtcttcccctttggtcctctccatcctcatggccagtattgttgccctggcaacggccattctcccttctctcctggctgctctcagctggggagcatgcccacttctctctaacctgtagagaaactctcatcttgatctgtctcccttctgtcccctctctccttccatcatcagaagagctggggagggagccattggcttcagtgttgccacccctgcttcctctgtgccagccaaggtgctcaggcagggccctctacccacctcctgtgtgccagatcttcagtctcttgtcctttgcacgttcatctgcccaatgtgagaggtccctgtgggtgtcttatgggctcctcctcaccattggctacaatgacctcttttccttcccttcccaaacccatctttcaagaataacacactgtatgtcccctttgatgaagcctctgctggcttcttccccccaggacccccatcatctcccaagagctcccccaaggaacagccaggcatgccttggtttgggcacttttctcccctacgagactgtgaaccttgatgtcagggtcttctgtggatgtcagcacagaggaaggctagggatgtgtgtggctgggtggggaaggggatggacagatagacggaagtcatgtatgtctgtgggtttcctctttgtcttactcttcttcttcttcttcttttgttgagacagggtttcagcctgtcacccaggctggagagcagtggcacaatcacagctcactgcagccttgacctcctgggctcaagtgatcctcccacctcagcttccagagtagctgggactacaggggcatgccaccacacctggctaatttttttgtatttttttgtggagatggggtttcaccattttgcctaggctggtcttgaactcctggcctcaactgatccacccaccttggcctcccaaagtgctgggattacaggcatgagccactgcgcctggcctcatcctcttctttatcagtccctttctccccttcctgtcattcttctattttttttttaaccaaaattattttgctttccaatctcatcagtgatatgcaaatacattttcttcttaaaagattaaaacattacatatgagactaaagtctcttccactgtacccaccaccctacctcctggtccccagtcctctctttcctaagaggaaactaagttatcaaattagtgggaaaaaattcatctctctctctctctctctctctctctctctctctctctctctcataaaacagcccaaaacaaagccaatgatgatactgctttcccttaagatcaggaacaaggcaagggcacctgcttttagtctttctatttaacatgatattggcagtcctagccagtgcaataagacaataaaaagaaataaaagaagatatagcctggaaaggaagaactaaaactgtctccattagcagatgacattactatctatatagaaacttccaaagaatctacaaccccccacccagaactagaaagtgagtttagcaaggttgcacaataaaaggccaatgtaaaaatggccaatataaaaaaaagtcaatgaacagttggaaatggaagcatatatattcctctagaaaatgcagaatactgtttggtgttttttaaagaaatggcctcatactgtatacattattctccaggggcttttacctccagcagcccccatagggccctcttccccctttagaacagagagttgcactacattcttttcctctgctgcataggattctggaaaagggaggcactggggtttatgtagacatttccccagggaaggacactttggttgtgtctaccttttcaccattacagacgaggctgcagtgaacacacacgtctccttctggctccctcttttaggttccagggcactccaaaccttgtctgggcattcatctgtctcttggggtctccaagtgctctgtcactccccttcttggcctcatttgccctttgtttctccctcatctttcccagttccccttggacttggccctagttcttgagtatgtgtgtggggagtgtgtgcgttgtctgttccccattctgtttatgtaacagtaacaggtcccatcaggaaagtgatatcacaaccaaattaggataatttcaggtgactcctctctggggcctttctcaggtttttgttctcaccctctgggctaccccacccatcctcccacccaccgtgtacccattcagaaaaacgcactgagcctgttccaggaactggtgttcaagcttggccatgtgtgtgtcagggtgtctgtgtgcatgcatgtgcctgggtctcacctgcctgcctggccatctccctgaagaccccacctcgctctacttcccatgctctaattttttgaatgtacacatcatcttgctcatccagcttctgtcttggtctcctggctcagtgtgtttttttcccactctctcaagaagtgttatttaattttgctctgagttggtgcatccttcctgctgtgtgtgtgtttgtatgtgtgtgcacacacacatgcgtgcgcacagcttccccctagctccctctctttttctcaagctcataaagtttcccactttctccaggtcttgctgtgtgtgcatgcacatgtgtacatatgttggtcttcattggattccatcctctctgtttttctcagtgattcttcatccatctgctagtccatacatccaacacaccatacttgttgagccaggaccagggtctgcctgtgtgtcctgtgtctttctttccttcctgactcctcctgctttacctaccctcacatcttggggccccaggttcctgtcctggatcattccctccccagcttttcaccagctccctgaggttcacagagtcattctttgcattgacactccagcatcccctgcagcccagaccctacttgttctctcctcatcctgccagtgaatcgtggctcacacagactgggctctttcactcaagcccagcacatcctgtccccatcctccaaatgcgtttctcactcagttctcattggcactgagcttcaccaccacctggggtttcacagccaggagcacgagtcatctctgattccactccctcctgctgcccactacccatctgtcctcttttcctttcaagtctctctccaaggggtggctaagcagccccctccccactccgatcacttcagcccctgacatagcccagttgtcaggtttatgatgccaggagcatccatccatctatccctccattatccattcatcccccatcatccatccatgtccccatcatccatccatccccatccatccatcccccatcatccatcccccattatccatccatcctctaccatccatccatcccccattatccatccatccccatcatgcattcacccccccatcatccatccatgttcccatcatccatccatcccccatcatccatccatccgtcatgcatccacccacccatcatgcatctcccctattacccatccatcccccatcatccatccatctgtcatccatccaccccccatcatgcatctcccccattacccatccatcccccatcatccatcctcccattattcatccccccatcttctgtccacccatcatccattcccccattacctatcccctcatcgtccatcctttcatccatccattaacagacttgcactgagcacccactgggtattcgctggggtcacaggccacaaagccttaggccatggcctgtgggagctcagagtccagggagaatacagagcagttatgcctgcactaaaagatggctgatggaggcttcctaagactttatgtcacgctgcaaatcacagtgtgtgtgcatgtgcacatgtgtgcgtgtgtgcatatgtgtatacatatgagtgtgcacctgcgtgtgcatgtgtgtgtgcgcatgtgtgtatgtgtgtgggtgcatgtgtgcatgggtggggtcactcctggctacttctccagcccctttgcctcctccttgctctagcgcagatgcctctgcagctgcgcctccctcttctgcttctctccctccctgagatctccctgcttgtccactcctgggaattcaaaggccctgcaacaaactgcctcacctcagtgtccccccatcacggctcttcagctcaagccccagacatcacatgttcactattctctcccctgctctgttcactggttccaccagcttcacagactccctgagccaggatcaaactctccatcctcctacccccacccccactcccagacccagctgtctggccacccctcccctctccctgccctacctctaatgtgccccaggtcttcacaatcttttccgcaaaatctcactcccacccccacctgacgctctctcttccccatggccctctcagcaggtagatgaggtggtggaggtgggggtgagactgtgcgccctcataggctccctcctgtttggccacagatgagctggggagggagtattaggcctggaggtttctctgccttcccctctgcaactgaggacccctgccctaagcccctcatagtgccccgcaagtctgcctacctgctccttgacaaacctgcagcctatccattcttcgctcccctgccccatggaggccagtgctggcttctggacagcagcctctccctgggccccagacacggaggccagactttcccgcacctctcagttgggcctcctccattcctttgaagggtttctcctgccagctgcgtgggactccggtgctccagggccctgccctgcctgctccccagcactttcctgcccttccaaggctgacccctggccaggctccactctggccctctctgcagagcccagatgtcatcagcctgacggggaggctccatgtggagtggccaccaggttccatccccttctcccacgccccaccattgtagagaagaaggcctgggcccttgtcctccccagagggcccttgtcctccccagagaagctcccgctgagccttcccttgggccctcctggatgcagggagcactcccctgggagcactcagcaccaggcttgtggtcgtccttgtccccgccaggccacgggctctgtggggcctgggtgtgacctctctcagggtcttggcactgagggaagtgtggagatgaggacagacggggcatctgcgagctctgctcttctaccctcttactctttctccccttgttgcttcccatctccttttggaaaatcattttttaactccacacatgctataaagacccactgtatttgtaaaaaactgaagccttccatgtaggactgaggtgccctttgacccctgctcctctcttcattcaggccccaacaggaaacagatgtctccctccaatctaggaagcctcaggagggtctgtttacaaaggtgctgagggagggggtgcaggagccaggagagcagcaaacttgtgatttccagtgaatccaaaggaaccagggaggagaagtttccagaaggcagctgagagggcagctgagagcagagggcacagcagcctgagctctgggggagcagacatgctgatctccctccctcttccctccactctcctgctgggggtccccagtggccaggtccagcgcgaagctgtaggcccaaggctcatccacggggctcagcctccccagcccagagcagggaggaggagcggggccggtggggcgggaagggcaggtgtgggagtcattgggcatctgcgtcgccctgggggctttcccccctgaggcctttctcaggcttggttgccctctctgtgctgcggcgttcaccacccacctaacaaaagcatgtgagcgcctcctgggagccggcgggtgggctgcgcgcctgctcctccgcctgtctgcctccccaggcttctgctccccttccttgacttttcaaacttttctctgatgcaccaccccctctctcggtgcctctgtctcctgctccctcagcctcgctcctccaactctccaggggagcttgttgaattgggctgtttgtgcatcattcctgcagtgtgcgcatgagtgtatacacaaggtcaaggttggttcccacctttcccgtcctgcttcatctgtctgtgtctgcccacccatctatccagtagtcattcaacaaacgtgaattgaacatctgtgtgtgcgctgctgagggtgaagagcccggagtcccacccaggctgtgtcctgaagaaacttggagtccagggcagacacaccggttgttatatcacaagaagactgggttgggtcaccgagcatcacactcagggtgtgtgtgtaatgtgtgtgtgcatgtgggtgtgtgttgtgtgtattgtgttatgtgtgttgtgtgtgtgtgttgtgcgtgtacatgtgcatgtgtgtgttatatgtgtgttgtgttgtgtgttgtgtgtatgtgtgcgtgtggtgtctttctgcattgcccacttctccacacccgttcctccctcacccctccagcgtcagccagccctgggctgtgttctcttccatctgcgcccctccacgcataccccctccccgggccaggccgcccacctgtggggcttctgagattccctctgcttgcctctgtgtccacccgggcccccctacgtacaccccaggcctacgcatctaaacatcttcttacccgcccccacctcctggacgtcccaccggcatcacaaactctctaagcccagggagaaatccttgacttcccaatccttcccctgtgctccccttcaccatccctgggcactcgagtccaggcgcccttcccctctactgcccccacctttcaggtttgcctcctctaagccacactcccaccccgtcttcccttcactcctctccattaccccattcgtgtggttgccctggcaacgccatgttcccctctcctgggtttttcagaggcaaacttgttcacttccctccgctgacttttcgttcccatctccctctcatctgctctctcctccgtccacagaggagtttgagatggaacttcaggctctttcccctcttccctcccgggccctctgtgaccaccacctgccccgaccttgagcccaccacggggttcacctggggcctccactgacctgtttgccaaatggaataggatcttttatctcctcctctcccctcgttcatgaggggtcctggtcaaggtgccaggaccaggatccctctcctccctaagctcctgggacagtgagggtctgtcctgccacctctgctgtttgctttggtggaatcctcttgctctgtgatctgctgcgtcgtagcgctccccaggccaggccctgccttccccaacctgctgcacaaactcttctgtgggtcggttccatccctctcaggccatagggtccattcacaccttgactgtgtctgtggccaactcttcctgctgagctgggacccccacatccattgccctgaggggctgttcccctggccacggcctcgacagggctccttcctgtgtcctccccacagagagccctgctgaaccttcccctggagaagctcccctgccccccaagggcactgggaccctcaggaacggctaggtttggacatctttctttgagcttcttaagaagagtctgcatgtctggtgctcagcatggaggagaggctggctggaggggaggacagacagacagatggatgaaagttgtgtctttctagaggatctcttctcttcctttaactctcttgttctctttctctttcaaaaaattaatgcttattgtgaaacctcgtctctacaaaaaaaatcagaaaatttgctgggtgtggtggtatatgtgcctatagtcccagctaccagggaggctgaggcaggaggatcaccagagcccaggagtttgacgaggctgcagtgagctgtgatctcaccactgcactccagcctgggtgacagagcaagagcctgtcttgaaaaaaatatgaatatttaattacttaagtgacacatgaccacatcatctttgcataaatagtaaagtattacaaataagattaaaggtctcctttgacactcactcatcccatcctgttctctagccatttcctctggggaaaaccagttcttactttagcaggaatcattctatactacatacatatttttaaacataaaaatgtatatttttcccctatagaatctgatttttttggtaggttttggcttagggcattttttcctcatagaaattgcattgagctatgaatattgctcttcagtgggactttgacttgacatattttggggatctccttccatctcaatatataaagctgtccatctgcctttttgtcagctgcatagtattccagcaggcagagctgtcatggtttattggccattcttctggtgatgggcatttagatggtttctactcttttgtaattaaaatgaggttgccgcgaacacctgtgtccctgcttccccttcccattagtgcgttctcccttccgcctcctggggccctgggttactctttctgtctccttttctttcttgttccctctcagcttctcatccctccctgttctttctagatgttgctgtcactttatgtgtcccagcatggggtgtgtgtgtttgtgttgtctatttttttcactgtgggtttgtgttagtcagggtcctaacaggaaagggatggaacacttaaatttaggaaaatctgaggcgagtttgtttacaaaggtgctgtattgcaggatgtgggattttgcagaaacctagagctaatagttgtgaggctgtgaccaccccctactccctaaggggtgaagggtggaagtaatgagtgaccaggccctggaggcaaactgtcacctagaggggctgccttgctgggagctgagacctctaggagagggaccacccagactgaggtgacccggggggataagcatccttatctcattctcctcccccatcatctcctgctggccatctcactggccaagcccagctggaagccagagggaagagcacctccctgaagggtgtcatcagcctcctagagcaaaggagaagggtgaaagggacaggggaagtagagggcatctagaactttctctctccaagccctttatcaggttttgtttccagtctctgggttacttcatccacccatcattcccatccacacatccatccagccaatgtgcatggatcccctcccaggtgccatgtgcggagtggcataccttttggagggtttggctcccctgtgagcccatgctgggcctctgcctgccacccccactgcctgctggcatggctcacgccccctcttgttttcaactttcttattgacgtctactcccccttctcttcctgtatctgactttgtcttgctcatctctgctctttccctctctctagaggagagttattgaattttgctctgaggctgtgcgtcattcttgcagtgtatctctgtgtgtgtgtgtgtgtgtgtgtgtgtgtgtgtgtgtgtgtgtgtgtgtgctttgtgcatgtgctggctgactttcccctgcagctctctcttttctggggcttgtggagttttgctctaaagttctaaatttcttattgattttcctgatcctagtttccaccccctttcccagaggaaattttggttatcacaatgatgaccagcaaagtggtcacataggagtctttttcttcctggctcttttatctgattttattcttactccctgaattactccatccatccacccatccttccactccatctattcatccattcatttatccattatctatcatccatccaaccatccatccatccattcatcatccatccatccatctctccatctgttctcccatccattcattcatccatccatccatctctccatccattcattcattatccatccatccatccatccatccatccatccatccatccatccatccacaaacacagcagctactgagtgccaggacccatgtcctttttcctctccagtcaccgttgtgaacacacatgtgggtctcatctcttgctctgaggtgtgactagagttgccccccaccctctctgtcactctccttgctgtttgtctcctgctcttttatttgtctataaactgcttagttagttcagtgccaagggtggtctgtctgtcctgtctctcctcctctacttccctaactccccctccgtctgttctcacaccatggggccccaaggcctatctggagtcttctgctttctctgcacacattccctggatgtgctcacccacagctttctgtgctgacaccacccccttggcccctcatgcagcccagaccctttcccttccccttaagacacaggctcaagcttgacgaagccctgcccagctcaagccatcgcattgtttttgtacccaccagaggtgctctatctccattctccttggcactgagcatctctgccacccagggctcagcagccaggagcaccaagtcacctctggctgctcttatccctgtcttcatggtccatctgtcccctcttcctgccacatctccctcgaaagggcaggtagataatccctctccatcccctcagcccctgcctcagccctgatgtaagaatctagtgcctgaaccacatccatccatccatccctccaacatccatccctccaccaccaaacatcagttggacacttcctaggtgctctgattatgacacagacgcccaaaccccaggctatgccctgcagaagcccagagttcagggagaaattctcttgagatcttggccttctgttaatgtctccttcctgccctgccccccaccaactcctgtgcacagaagtgctggggagggaatcctaagctctgctgttttctccacagccccacttctctatggctacctgtggctggctctgaacccaccaccaggctcaggcaaggtccagagccccaggcctgaacttcctgccgcttcttcctgttctgccttttctgctggggcagttttctctgggaaacagggtggcttactatccatgcctttttgcacacagtaaagtccagacgtaagctcccatctgcctggggtggagacggagtctccctatgaacaccctacaggtatgtcctcctactccacctctggcctccttcttcttccttccccctccacgtattaagaataaggcatcattgaaaaaaacaaaggaggctgagaataagtggagaatcaaagtctgtgcagttgaagagctgaggctttgcaagttcaacaacaaagagagagggactgtggaatccaaactagataagagtgaggaaactgggtgggaggacagtgtacaactggcaggtgcaatgaggacaatgaggccctgggtcgtccccacagaggcctttgctggctgactcctgtcttccaggagcccccgggcatgggtatgagggcatctttctcttcgctcagacatggagcttcctgggaagaggacctgcacctggcttccttttgggtctcaggttggagaggaggatggacaaatggaaggtgtgtctttctactagtctcttttgctcctcctttgccgcctctcctctcaccctttataacattcattttcttttgagacagggtcttgctctgttgcccaggctggagcgcagtggcacaatcatagctcactgcagcctctaactcctgggctcaagcgatcctcccacttcagcctcctgagtaactgggactacaggtatgtgtcactatgcccagctaatttttttgaagcaaaatttgtatcattttaattatttttatgtacagaaaactcaacagtgtacatttaacccagtttagtggcaagttctttagcgtttacctttttgagcttggcgatgcgagccacagactcgggacccaggacattgcctccccagtgatggtggatctcattgtatctctcattgtaattggtccttataccttccaccagcttagccaaagcacttttgtcttcccagttaacctgtgtgaaggcgacagtggcacaggtcttcctgtggactagacgccccagtcttgccttccccttgataatgcagtaagggactcccattttatgacacagggcaggcaagaagacaaccagcttgatggaatccacatcgtgtgcagtcaccaccagctgagctttcttattctccaccaaggtggtgactgggtgttaactcctgcttgaaggacaggtagtctcttagtggagatgtcccctttgccagcagttttctcctcggcctgggccaagagcctctgcttcttctcttgctttgtctctggtctgtacttgtgggccagctcaagcagctgagtagcagtttggcggtccagggcctgggtgaactggttaattgcaggaggcactttcagccgtttatagaggaaggctctctgatgctgcaacttgatatagcggggccatttcacaaaacgggtgaggtctcttttgggctggatgtcctgtccaacaccaaaattcttaggccttttctcaaacaggggattcaccactttcttggcctcctgcttcttcacgacagcaggggctggagccaccttcatcccccggccttctttcctttcggcatcttgggcggcgggaggagagagtacacccagctgatttttaaaattttttttgtagagacgaggtcatgctatgttgtccaggctggtcttgaactcctggccctcaagtgatcctcctgtctcagcctcccaaagtgctgggaccacaggggcatgagccacagcacctggctgtaaaattaatttttaattacacaagtcattcacggacccactgtctttgtaaaaaacaaaaatcaaagtgttgtacataagactggtgttcttgtccacttcccatcccatctagcccagggtacaaatactgctcccccgaagtaatctcagtattgatttgggagaatcattccactctctgtatatgatattttctcacgaaaaaaggcaagtcctgtgggtggtgctggctttggttttgatgtcaaatgagaatcatattgaaccaggcacacctgctctgtggtgggcttttctgcacaacagcggatcacagatggcttccaggactcagaatctctgctgcatggtagtgcggaggccaggtgaatggtggttgatgccactctgtggatgggcatgtagctgcttccccatgatcactattacagacgagctagctgcaaacaccccggcccagcctgcccccatccctctgcatgcacagtgctcgctgagctccaggctatgatctgttatgtcctcccctctccttctcgactccatctcctcctcctgtcctccaaggtcaggccccactccttgtcctggtcccactcttctggctgacaccgctatccctcacttgccatccgaactctgccctcaaatgcagaatcagacttgaaaccaatatggacccagagcttctcacccacaagtcatcttcacattccaacccatcacctcccagggccagccacacacttcctggtctcagcactgagcatcaccacctgccaggagttatctcagctgccaggagttatctctgacacctccctctcctgtcacccatggcacatctgtctccccttcctgctgctgaatcttcctccaaggggctgttcaagaccctaacccaacgcctcagccctggccacagcaggccttagcatctcatgcctggaccataggcctgtgtaactacttcttccattcatccacccacacatccatctattttccttccttccttcctttcttccttccttccttccttccttcttccctcctttctttccttccttccttccttcttccctcctttctttccatccttcctcccattcatttttacgtatccatccatcatttctatccatctacccatccattcatctatccacccattcatctatccatccatccatcatccacccatccatcgtctacccatctatcacccacccattcacccatccatccatccaacaagcatacactgaacacctactggatgttctgctgaacaaaacacacagctcccagagcccaggagacatcctggtgcatctgtgtccatgaggaagcagactcatcatctgcaatgaaaatatggggtgataggtgccacccatgtgtttgtgtcactgtgcctcacagtgtgtgtggtgtgtgaaagggagagatgtccacgtctctgggcccacgctagatctctctgctgaagcagcacgctttcaaccatgcaccccactgaagaccctgccaacagcattgactcactaagtcctccacaggctctgtgttttccccgttttcccaaatccaggactgaaaacaggcaggccccatgccctctgcctgcctcccacttccagcccagggccacttcctcctctaagggctctctcccatcttctcctctgatcctctctgtgctcccaggcagtgcctttgccctggcaacagctgtcccctcccgtagaccctctcctgcgctgtttcagcaggtgggcaagctcaccccactcctacccaggagtccttccttctcccttgacctgttcccttcttcctcctatgccttctttcctcccagaccagccgggtgggaactctcatccctggatgtggccactccctccctcccatcctgcacacccctgcagctgctctgtacctgccaatggggagaaaagaggcctccaaaccccacagcccattttctctccattgatggcctctgatgctgggggtctctcctggcttctcagcccctttctttccttgattctacctctcgggccacccttctcctgtttcctctgcagcctccttggcttccatcagccctctgtgtccatgtccccagggccccatcttccctctccctgtgctctgccccccaggcagccttccctagagcctgtgtgaccatcctcatgctgacctcatccagcatctcccctctcatcctgcagctgtgctgagcagggtcatgggaggccctgggaagccccctgtcctcctcaaaagagtccttgctaagctcttcctgggggcccctgacctattgggcgaggattctgtgtccggagcacccagatatatgtgtgttgggcaactttccccacccccaggctgtgagcaccttgagggaaggacctgcatctgatttgtctttgctgaatggctatgactatggcagaggccggagggacagacgaactgaggacagacggactgaggagagcgctccttcctcctcactctcgtgttcccttttttccttccattttcttcctctcctaattaaaaaattagtttttaattatgtgtggtacatgaagcaattatttttgcacaaaattttaaaaattttttgtgctttcacaaaattaaagcatgacaaaaggctgaagtctcttctctctccctcccgcttcccacctccaattcccccaaaaaggggaacctctgtggccagttctgtgtgaccctgtccacacagcctatatgtgtcctctcatctaaataaaacagagctgcatttggtggtggtggggtgttgtttaaaatataaataccatttactctgtgtaaattttgccaatagctttgtctgtccagtgatgagtcttcgagttctttccacgaacatgtgggtgcaccgtcattggtgtgcaagagccaaagtgggcacctcttcctcatcctgctcagcgatggcacgatgctagcctgaaattggccatggtggtagtatttacactacagaagcgggcacaagcaacccatagggaacattctccccagagggccagtgtgcaagcataccccaggatgcaccctgtttcacagatctgggtctttcgggagagagctgcactgtgggtgaccagctctcctgtggatggacatgggtgttttccccttttcaccatgacagataatgtcaccacaaccttatctgtcaccgattcctcttctgccttgccctctgctgggttctggtgtggtggggcggtggggcggaggggtcctcagaattcgtctacagtatgtgggttcttttctgtctgtccatggaatgtgctgcctcttcaggtctctgggagtctgtctctctccttccttccttcatctttcctcatcctctccctcgtttcttctcctcctctccagatttggcccttgccccaagggtcacgatctgtggctgcttctgtgtggaggtgtgggtcccactgtgcacccctctatttaggccctttgtcaggcttgtcctcccccgtctttccctcctcttccatgtgcacgcatctctgcatctgcctgcgtctcagctccccgagggtcctgccgccccctcttcatttcattttttaactttattattgatgtgccccgccaacactgcctcttcctgcatcttgctcagcctcgctccctctcgctctccagaggaggcttattggattttgcttcaagtctgtgcgtcattcctgctctgtgcatgtgtgcgcacatgttcgtgcgtgtgtgtgcctaccactttccccgtcagctccctctctctctttctggggcttggagagttttactctatgtgtgtgtgcacaggtgcacatgtgtgtgagtcacttctctgtaaggtatggtcagggctgggtcccaccctccctgtcactctcatgaactccatctatccacaacatgcctggtgagctctggaccaaggtttgtccatctgtcctctcctgttctcttctttccctcctcttgcgctgcacctgccctctgcacaagaggtgccccttatgcaccttgggcatagaggcctctgtaaggacatcccccaatctccttctgcgtctgaaaatcacccaccttcattctctgttgcatgccacagatttggggccagtgttgactggggccctccagaggtacctcaaactcatctaatcatctctgcactacaaactggcccctttcctgttctcattaacactgaatgtcagtgccttcctcggtgtggtgctgcagccaggagccctgcatcgtctctgactactcctgtttagccacccacagcccatctgttccccctccctgccaactctttctccgaggggctgctaaaggcccccattctctcagtccctgctgcagcatcgtgtggagatgaggggataattgtcttcctttgtccatccattcatccatccatccatccatgcatgcattcatccaaccatccatccatccatccatccatccatccatccatccatgcatccatccatccatccatccatccatccatccatccatccatccatccatgcatccatccatccatccatccatccatccatccatccatccatgcatccatccatctatgcatccatccatccatccatccatccatccatccatccatccatccatacatctacccacccatccatacatgcatccctccatccatccatccacccatccacccttccatccatacatctacccatccatccatccatccatccacccattcctccatccatctgttcattcatccattcattcagccatccatctgcccatccacccattcacccacctatccatccacccatccatacatatgtccacccacccattcatctgcctactctttcatccatccatccatctatatatccatccatccatccctccctcctaccacctgacatacattgagcacctgagtgctctgttgaagacaaagactccaaaaccccgggctgtgttctaaggagtccagggggagagaggaccagttaccacccatgggaagatggggtgatagggactttggaagtctccaagcatcaccgtgtgtgttcttgcatgtgcatatatgcatgtgtttgctctgtcttggccactttctcagacccttctctttcctcctgatctctactatcagtgctccccagggctgtgtcctcacccctctgcccttgtccttccatgggccatactatccacaccagggcttcagaggtccctgcacacaaactcctctgcatttctgtgctcatctcccctctcccagacctgtatactcactgtcctgtcctcagccccactcagtcatactcccagcatcatacactccccaggctccaaacaacctccctcctctccaggcttcatcttatgctctcatcctccatctccagggacagaaatccaggcttccccttctccccacctccttcctttaaacttgtgctgactctttctcccaaatctcccatctcctcctttgctcctttcatcccatggccagcatggttgccctggtgacagccatcctcttccctccttctgagtctgctttccagcatgagagatgtgttctggtgacctgttcctcccatgctctgtcttctctctctgtccatctgcagaaaatctgggaaagggacccttggctttacttgcttccattcccagcccacgcataccccatccttggcaagggacctcagccacattgagcccaccatggttctcaagagagctctccatagacctccttcttgccaaagcccatggtccctttttcctcctcatttctcctggcccattggggtcctgattggggtgcccatccttgcttgggaggccactgtctcctccttcaggacactgggtgctcctggcttttctcccacccattgggcagtttctctcttccatccacctctcaatactgatgcttcccagagctcagtcctccaccgcttcctgccctgcccgttccccaagggcagcttcctccacccccaggacatctgtggccacccattgtccttcttggacatagagctctctcctgaactgggacttgcacatccatgtacctgaacacaggactagacacttccctgcccttcccacactgctcttcttttctccaacctcctcacctgcccagctccccatcctcagcacaagtagaccaagtctcaggcactttcttgactccttctgaccacatccagtcccaccatagggctgtgcctccagcacaccaccaccatcccatctgggtgtcagctcccagggcctcccgggtttcccatctccagccttgccccttcctgtctacacttggtgaggccacccaagccacctttctaaatctcccacttggcagctcacccttcactggcctaaccccactaagccagcttccccacctccccaccctcctgataaacttcaagccaatttttcctgctttaaggctctgggcaaggccaaaccctcacactcttggtgacttatccttctgccctgtctccagtcacaaggaacctcttgcagtgcagaaagactcaccctctccccaccttctggcctttgctcaagctgcccttggcaggaacgcctctcacctgtctgcctggcacacagcaaggcttctcttggctcaggcacttcatcctccctgatgaagtcccagggcctctcccctgaaagcccccatagcatcacaggatcacacccctgggaacagccaggcacatgcatgtgtttggggggatctttcccgccagaccacgggcatcttgagagcctgcatctgagttctctctgagtgtcagcacagaggaaggctgaggaatgtctgaagctggaggaacttcaagttgaaaaaaaacactaaaatttcaggaaggaaggactaaagtctcctttgaaacctcctcccaaatcctgatttctacttattttcccacatggatcctcagttattagactgatgtgaattatactggtagctagctagctagatgattgataggaaggaaaaaggaaggaaggaaggaaggaaagaagagaaaacttgttctattattgttggtttggttattgttgtttgaacataaatactacacactgtgcatgtgatttggcagtggccttcctcattcagcaatgtgtcttgggtctgcttccatgtcagagtttaggtgcatcacattcttttatcagatgcacaatggccgagctggcttcctcctgccgatgagcatgttggtgtccctgctcttttggtgaggtggtagcagcttctgtgcatggcctctttctgtgtctcactctagggtccccagtgtgtgatcaggctgccgtgtgcctgcttgtctgtctgtctgtgtgtgcacacatctgcctctttgcctctctgaatctctctccttccttttcccattctctctcattattccatattccctctagatttggtccccatgttgcaacacaactgtgtttgtgtgtctcaccctgggtcacatctgtgggttcctctttacttggagccttttctccttctgattctcattcacttggtgacttctcacccctgtgcatccacttgctctgccatccattcatccacccactttggacattgagcatcttccaggagctggacagctcccatacgtgagtcagtgtgtgtgccccctctgtgtactgcccctgggtctctgcctgtctgtgggcctgtctctccgagcccccttctcccacccctgccttcatcctcctcagctgcacttccttctgctctccagaggaaacttatggaatttgctctgtccacgcatcattcctgctgtgtgtgtgtgtacttgtgtgtacgtgtaagtgggtcatctctttctgaggcatggtcagggttggcttccactctctgtcactctcatggacatttcatctgcttgcctctccatccagccatctgtagcatgctcagctaactctggggcagggtcttcctgtctggtctgtcttcctttccttctctttctctcactcctcacacactccccggatgaactcatcccctgccctctgtgctgacatctccctaactgctcctgcaaccaagactccccacctttttctcttcttcgcaagccactagattcctccccaggagaatccaacccattgcatcatcttcacaccctgagatgtgtttctcttccagttcgcattagcactgagccccgctgcctgcctcaggctgcagtgggagactgagccatctctaactccttctgctgcccacggcacatctgtcccacttcctgccaagtctctttccaagggaccactctgagacccttctaaccccaatcccttcagcccctctctctggccaggccccagcatcctgtgcttggacaactgaagaggcttcctcctttgttgtccatcctccactcccaccccctcttcatcctccattaacctctggaagaatcatgaatcacctttgcttaaatcctcccatagcttccatgtcactcacagtaaaagttaatattctcaccatggcccacaggccttacccagtctatttcctgttacctctctcctttcatctcccactcctttcccccttgctcatgttgctccagccacatgggcttccttggtgttccttgagcagacagacaccagggctgtcacctatggttgttcatggcatgagggcacctggcagaggatgtcagtggaggacaaaacccagcccttgttctgttctccaagccatgagccctggtttggggttgcctctgcttagaagaaagattgtctatttcttttaaatatatagatagaaaagacctttagcattcttgcttacttgtttcattatctgttattttgggatctgtttctatttactgatttttctcctagttatgagctacaatttttggttcttggcctgtctaggaatttttgattggatgctggacattgtaaatgttacactattgatggtctggaattgtgttgtcttctgttaaagagtggcatgcagttaaattacttgctaattactttgatcattttgaggcttatttttaagctcttttagggtgggtccacagtagccttcacttatgggatagttcctaacctgtgtgacttctaggaattgttcaaattaaaatgcttcagtctttctttgcctggcctcagggaatttcaccctacacacctgaagccttgcacatggcagtgattcaagaggacacatgtagatttctggagctgtttttcttccttcagtcaggtactctgcccctcaacttacagccacctaagcctacctgaactttgttcttggtctcaaagatcaactcagcaatactgctggactctatttgaatttcccctccctgcacctaagatgcctccagacagaaagctgggtgaactgtagagctaacttgatttgcttacctttcttcagggatcactgtcttatgctactgcctgttgttcaatgtctgcaaacaattgtttccaatgttttgcctagtttttttttctaattttcataaagctctttattggttagtagagacattgggagtcatgatcccaccttagagcctttgcacttggttccctctacctggaacgcttcccccagatatccacgtggccaacttgctcacttcacaagtgctcatgttaccctctcagtgaacccttccctaaccacctgctatggactgaatgtttgcgttttcccaaaagtcaggtgttgaagccttaatgcccagtgtagtggtatttggaagtgggcctttgggaagtgattaggttttgatgaggtcatgagggttaagcctccatgatgggattagttcccttaaaagaagaggaagagaggaccagatccctctctctgtgtcatgtgaggatacagcaagaaagctttcatctgcaaactaggaacagggccctcaccagacaccaaatacgctggcaccttgatcttggacttcccagcctccagaacgacgaaaaataaatattgcttaaaccatccagtagatggtattttgttatagcagcctgagataagatatcactttacttagaattgaaactacctcaacttgtaatgccccattaccttgtgtatttctctctatgtatatatttactgtctataaaattaattgcctgtcttcgtcccctaacctccttctgctctatacctgtcttttttccattaacatggaagcttgatgagggcagagaattttgtctgtttattcactgctgcatccccagtgcacagtggggatagttcggcttgactgtggggctcacagggatttaagttgagcagcgtttctgtaggtgcccaacacatcctggagcaactgctggtgctggctgaggttaggatggggaaggggtagaaaggcctgttcagggcctaagcagctcaccatccattcacagttatgctcagaatctcattctctacctacacctaccacctctgacataagacaatgtctggcctccttgccccagcacaggcttcttcctctgcccagagtacaactccctggctcagctatgtggcacagacacctagcttcagagtctccacctgtatgaagtgttctgtgaatcttgtgacttccaatcccttcttcactctgggaccaagaaaattctttctaaatgccttattctattcaggcttctataacaaattaccatagactgggtggtttacaagcaacaaatatttatttctcaaagttctggaggctgggaagtccaaggtcacagcaccagcagatctggtgtctgatgaaggctctctggtccatagacagtgcctttcagctgtgtccttacatggtgcaagggctgaggagtctctctcaggccactttttaagaaaatcattcatttttctttccaacttttattttacattcatggggtacatgtgcagatttggtatataggtaaattgcatgtctcggggcattagtgtgcagattattttattacccaggtaataagcatagtacctgataggtagtttttccatcatcaccctcttcccaccctccaccctcaagtaggcctctatgttattgctcccttctttgtgtccatgtgtactcaatgtttagctcccacttataagtgagaaaatgcagtatttggttttctgctcatgcattaattcacttaggataatggcctccagccccatgtacgttgctgcaacggacaagatattgtccttttttatggctgcatagtattccatggtgtatatttaccacatttttctttatctagtccactgttgatgggcattgaggttgattccaggtctttgctattgtgaatagtgctatgatgaacatgtatgtgtctttatgatagaatgattttattcctttgggtatatacccagtaatgggattgctaggtcagatattagttctattataagttctttgagaaatctccaaactgctctccacagtggctgaactagtttacattctcaccagcagtgtataagcattcacttttctctgcaacctcaccagcatctgttattttttgactttttaataatagccattctgcccagtgtgagatggtattgcaccatggttttgatttccatttctctaatgatcagtgatgtggaacattttttcatatgcttgttggccacatgtatgtcttcttttaagaagtatctgttcatatcctttgcccgttttttaatggacttgtttgtttttttcctcaggccccttttacaacggcactaatcccattcataagagtagagtcctcatgacttaatcatcccccaagggccccacctcctaataccatcacctgcagattaggatttcaacgtatgaattttgtggggggacataaacattcagaccatagcactaatcccagaacgttctatgtcatttcctctctctaacgccttccactgcaccccattgctcctgtgagaaatatcagattcctcaagttggtgtatcatcttttacaacataacaacaaattacgcccatgcaatcagcttaacatgacaaaatcattttctcacagtttccgaggtcaaaattctttgagcagcctggttgagtgtttctggctcaggttttctcatgagatgtagtcaggctgacagctggggctgctgcatcctgaaggcttcaactggggctaaggatctgcttccaagatggctccctcccagggctgttggcaggaggcctcatttccttaccacatgggctttccacagggttgcctgagtgttcttacatggcagctggattcccccagagagagtgatgacaaagaaaggtaaggaggggaagagggtggggagggagaggggacactggggagccacagtgacttttatgacctagtttctgaggctgtacatcatcacctccactttattttattcactagtgacttattaagtctagcctacattcaggggaaaggaattaagctctatctcttaaaggtaagagtaccaaaggatttgtggacatacctagctacttgggaggccgagacaggagaatggcttgaacccgggaggtggagcctgcagtgagctgagattatgccactgcactccagcctgggcaaaagagcgagactcggtctcaaaaagaaaaaagaaaaaaaaattgtggacgtacattaaaagcactatagtcttccctctgaccacaaattatttacattcttctaacatgcaaaatacagtccaccctccgaaggaccctgaagtctcatactggtacagtatgagcttgaactcaagacttttgtcatctaaaccatatgcaggtgtgggtgagtctccttgggagtggttccctaagcatatccccagcaatacactccctctcaatgagtaaacctgtgaatcccaagaggtgagttacctatctacccctcaaccccactcggcacccagtatacaatggtggaataggtataggataatcgttcagaaccaggggaaatgggaagcacagataagtcgctggtccatagtaattctgaaatctagctggggaaatgttgaagggttaggacttatgctactctggctcagaaataattttccaaggggttctgctctttctgtctccttctaggttcttgggtctacctcaaagtaaaaagtagcctgtgtttacaactgtgttcttttctcagcctgcttcctgctaatagaatttagcaagttcaaaggcctctttcctttcacattacctctgtccctttcagtacatgctgatgctatttctgttgatataattcttttttttccccctcagacagggtcttgctctgtcacccaggctggagtgcagtggtgtgatctcagctcactgcaacgtctgcctcccaggttcaagtgattctcccacttcagcctctccagtagctgggactacaggcacacaccaccacgtgtggctaatttttatattttcttagagatggggtttcgctttgttgcccaggctggtcttgaattcctgggttcaagcaatcctcctgcctcggcctcccaaagtgctggaattataggcatgagccactgtgcctggtgatataattctttttaaaatgttgttgttttcctgtgaatctttttgggatctactctacaagacaaaagccacacccaaaaatctcttgagataagcccttgactactttgtggttctgcagagacaagctcttaaacatccaactgtttgagtcagagggtctgtgaggtaagtctttaaattttttagagggccctttgctgactgagagtactctgaggaaccactttagatcttttgcagccacatcctcacctgatttttagattatattttcttggcaatgttctggattgaatctttactcaaaaagcatttcttaattttagcaaggaggccaagacttttcaaaaccatcaagtcctggcttcttcatgtttaacagttattcacttagttcacctctttaatcttgcatttaccataaatatcaaaaataaacagatgacatcttcaacagtttgcctggaaatctccttcactagatcacttgtctcactgggcacattttgtacttttcgtgttactgtaagcaatagtgttactaaactttttgctactacattagaaggatcccttttcctccagtttccaataagatcttcctcacttaaagaaaacaaaacaaaatgctcactgcagtctgcaaaggacgtcatgcttctataaatagtttctctttgaactcttcaaatgttcactataattctcatcaaaatctttcagcttctccccagtacctggttcctaagcaattctcatattttaggtttttgttatggtagcactccacttccaaataccaaaatacgtattagttatccattgctgtgtaacaaattgttccaaaacttagcattttaaaacaacaaaccattgttatctgacagagttgctgagggccagcagtctgggagcatatctggatggttctggatcagggtctctcaggagactgtagtgaagctattagctggggcttagtgatctggagtcctgaccagagctggaggctctgctgtcaagatggcccaatcaagtggctgttggcaggaggtcttagttcctcaccatgtggctctcttcccagggctccctaagtgtcttcagggcatggcagctggcttccccaagaggaggtaatcagagagaaaaagagagagagtggagagtaagaaggaggaagaggaagggaggagctacagtccttttatgactgagtcttcaaaatcctacaccatctcttctggtttgtcctatagctagaagcaagtcactaagtttggtccatactcagaatagaggaattaggttctaccttgaagggaggtgtgtaaaagcatttgtagacgtcttaaaactgctgtacttggcattcaaagccttctggtatctggccctgactaaccttccagggctagattaagaccaaacagagggccgggtgtggtggctcatgcctgtaatcccagcattttgagaggctgaggtggatggatcacctgaggtcaggagttcaagaccagcctggccaagatggtgaaacccccatctctacaaaaaatacaaaaattagccagtcatcgtagtaggtgcctgtaatcctagctacttgagaagctgaagcactagaattgcttgaacccgggaggcagagattgcagtgaactgagattgcaccactgcactccagcttgggtgacagagcaagactctgtctcgaaaaaaaaaacaaaaacggaccatgcagaggccccaggattatggttctccctcctcaacagtaaataaaaataatcaatacacaataaattaagtataagcaggttcacagagttctatttttctcatgataatgattttcataatatttttaaattattgaagtataatttacatgcaatgctacgcatccattttaagtgtacatcttgatgagttttcacaaatgcatacaccaatgtaaccaccactacaatcaagatatagaactttcctgtccccagaaacttccctccatggccctttgaagtcaatctctcaccactccttgcctcaggcaacaaataaactgctttccatcaatgtagatcagatttacattttcctgagttgcacatagaggaatcacgcaggaagtacctttttgcttctggcttattttattcagcataatgtttctgagattaatccatgtatcagtagtttgctcctttcattcctgagtagtatttcattctataactatatacatatttatttacctttttgcatgccgatgaacatttatttttttcccagtttatttttatttttttaagatggagtctcactctgtcacccaggctgtaatgcagtggtgcgacctcagctcactgcaacctctgcctcccgggttcaagcgattctcctgcctcagcctcctacacttgatctgagccaaaaggccgagaagcgatatgcctcagcctcctgagttgctgggactacaggtgcctgccaccacgcccagctaattttcatatttttagtagagatggggtttcaccatgttggccaggctggtctcaaactcctgacctcaggtgattcacccacctcggcctcccaaagtgttgggattacaggcatgagccactgcacccggccaaacatttattttttccccagttttaggctattatcaataaagctgctatgatatttgagggctggcctttgtgtggacatatgttttcatttctcttaggtaagtatatagaagaggaattgctgggttgaatggttggtgcgtgtttaactttataagaaattgccaaaatgttttccaaagtgattgcaccattatgaacttccaccagcaatgtatgagagtttcaggtgccccacagtcttgctaagatgtgatatggtcagtcttttatttgagccattctagtgagtgtgcagtggaatctcattgtggctttgatttgcatctgctgaataacaatgttgagaatcttttcatgtgcttatctgtcactcatatatcttctttggtgaagtatctgttcagatctctgctaattaaaaaaaaatcagcttgagtatcttgttattactgagttgtaagcattcttgttttgctttgtttttgagacagggtttctctctgtcaccaaggctggagtggagtggcatgatcttggcctccacctccccggtcaaggtaatccttggcttcaacctctgcagttggctcaggtgatcctcctacttcaacctcctgagtagctgggactacagatgtgtgccaccacacctggctcatttttgtgtagagatgagttttgccatgttgccaggctggtcttaaactcttgggctcaagcaatccacccgcctcggcctttcagagtgctggaattacaggcatgagccactgtacctggccagaatgttctttataaattctggatatgatgtgagataagagttaagcctcattttttttccatgtggtttttcaattgttctagcagcatttcaggaaaattatcctttccttgttgaattgccttggcactcttgtcaaaagtcaattaattgactgtgtatgtgtggttttacatctggactgtctattaggttccatttaaccacaggcaataccactttatctagattactgtcggtttatagtaagtcctcaaattaggtagcataagacctcctaatgtgttcttctttgttgagattgttttggttattctaggtcctttgcatttctttttttttgttggggggatggagtcttgctcttgttgcccaggctagtgtgcaatggcgcgatctcagctcactgcaacctctgcctcctgggttcaagcgattctcctccctcagccttctgagtagctgggattacaggtgcccgccaagatgcctggctaatttttgtatttttattagagacggggtttcagcatattggccaggctggtcttgaactcctgacctcaggtgatccgcccgcctccgctcccaaagtgctgggattacaggagtgagccacctcgccctgctggtcttttgcatttctatatcagttttacaatcagtttgtcagtttctaccaaaagtctgctaggattttgattgcaattgcattgaatctatagatcaatttggggagaattgatatcttaatgctatgtgaccctggatcagttacgtgcctcctctgaactgcagcttcctcctggtccctccctgacaggttttagtgagcaggcaaagctgagctgagcacagttatgggcacacaagggaacaggctccctgtgtgtttcagtggtgaggacaggggctgccataatgcttttcacagtgtgtgccagccgcaggtcgcaagaccatgggggctgccccaagcagggagtccatggccctggactgggtcctgtgtccccactcacttgttgcaacactccagccatgtggcctcctctccctgggcctcagttttctcatctgtaaatcggaggcagtgagtgttgccaggcagattccacgagatggcggatgagcaggagctaagaaaaccacctgttttctccatttcaccctgggctgccaagtgctgcaggcacaaatcacatcaccatgccgattggcgccagcacagattaattttctccaaccttggctgggtcttaagtgcagctcagcaaccccttgactggtccccaaacgcctttccgttcccgtagcagttgttccgccggggcccccattccccccttgttcccctgggccccacagacaagcccagctcctgctcaatggagaaaacacaggcatttgtggaggcactggccgctgccactcccctccctcacgcctctgcagcgatctgcctgcaccttcctgtgtccaaggccagctgtcccttgcctgtgtcctcccgggccttacatctgtcttttccttcctccagtttctccctctctgctggctcttttctctccacccataaattctcaaaagctcccatcctgcctctgccttcatcaaagtccccctccttcctgggcacccttccctgcatctccccttcttgtcataatcctcactacccccatgtttttttccaggatgccacgaggctcccacaggctcacctgcctgcctgtctcttgggggctttcaacatcagccacagccaagtgggacaactgctgggggccccaggcatgatgtaacaccaccccgctgctcgggaggatctgggaccccacaaagttcacccaggacacggggataaagttacacactgaggacttaatgagctcaccttggcagctcagcccaacactgagggattgcttaaatctgagccttccaccaggcctggatctcatcgatgtggggcctcccagcccatttcttccttcttagtataccctgtcttttcctccacccctctaccaacagtccccctccttctcaggcctggctgccccttctgggctgctccaggccctgtgggccatcgaaacctccctggccaatgtcatcagggtcttccatgagggctcagccagtggtgttagctgggcagcatctgagaccatcaaccacctcttcttcctcaaacgtgtgacccctgggtttccccagcatccacttctttcctggctttcttgcccattctctggccactttgtgccctcctcaccctttgtagctcctcttccctggctcgctaagcctctaagacttccttttttctcctcttctttttcttttttccttttggagagacagggtcttgtctgtcactcaggctggagtgcagtggcgcgatcacggctcactacagccttaaactcctgggctcaagcaaccctccagcctcaccccctcagagtgctgggattacaggtgtgagccactacccgcctccttcctcctcttctctcctctctcgacaccctcttctggggccatcatctctctgactgccgttctggcctccttacactctccctcgtgctcgatccttggctaacactgctgatgacatgtcaccacctcaaagtcatcgggccccaaaccaaactctatttttgatgtttatggtaaatgcaagatgaaataggtgaactaagtgaataactgttaaaaacatgaagaagccggaacctgatggttttgaaaagtcttagcctctttgctaaaattaagaggtgctttttgagcaaagattcaaagattcaaactctatctttcctcagaaccagccctccttcctgagtgtcccatctgccatgccttcagtgctttatttattcagtgatttcagcaagtatttactgggcacctaccaggggccagactctgttctagatgctatgatgctgcgtttgaggtgggacgtgttgaggctctgctagatcctttcagaccctgcttagccagtgttttatgcccctgaaccctatctttggtatgttagtttcccacgactagcccttgcaagttgtgtttgtgactaaagttccgggagcttctttccccacaggttttgagagctggaattacatgggtgtttatgttttgcgtcccaaccccacgatgcatcccaaatcctataggcatgcctgccttggtgcaagactctgaaagcccagcttccttgcctccaggagggacagctcgggagtgtgacttacccagtggagctcccctgtggggtgaggctgaggcagccccctgcgggacctggtctaaggtcacagcctggccggacctcctctccctttcctgtcctgcttccccattccctgtccagtttgtcttgagaccgcttcctgaataaatcacttgctcctaaattcttgtcccagggtctgcttctggggactccagcccaaggcagtgttgaacacgacggccaacgagttaccagcacttccctaatgccctctgaaacctcattcagactctcgcaccctgcaccctcagggccatcctcttgaggtgggccttgtcatcccgttgaatgcaccaagcacctcccagaccccagaagacaggctcgtccactctggtctagctttccctccagcccgctctcaactacacatctgattatgctgttcctccacttgaaaccctcccagccaactcaaccaaaatatgagaaaaagatttgaacccctacatacccacttagaatagctaaaatcaaaaaaccaaaccaaaccacaaaacctaacaatatatgaagtgctggcaaggatgaagggtaactggaactctcataggttgctggtggaagtgccaaaatggtaagcctttaaaaatggtttgacagtttcttataaagttaaacatacgttttatcgtatgacacaggaaccccactcttgggtatttcccctagaaatgacaactcttgtccactcaaacgcctccacatagacatttatcgtaattttatccataattgccccatatccataatgccccatatgtgaaacaacccaaatatctttcaacttgcaaagacattaaaacaaacaaacaaattgtggtacagccatataatagaacgattctcagaaataaggaggaacaaacatttaatcatacaacaacatgggtgaatctcagacgcattacgataagtgaaagaagccagacccaaaaggctacataccatatggctccatttatgacattctggaaaaggcaaagtagagggacaggggacagatcagtggttgccaggggctggtggggcatgagggagttttggagttgatggaaatgttttctatcttaattgtggtgggaggtatgcaatgacatgtatttgttaaaactgtccactgagaagagtgaatgtcattctatgcaaatggtacctcaataaacctgacttaaaaaaaaaaaaaaaaaaaaagccctttctggccaggcacagtgcctcatgcctgtaatcccagcactttgtgaagctgaggtaggaggattgcttgaggccaggagtttgagacaaacctgggtaacatggcgaaatcctgtctctccaaaaaaaaaaaaaaaaaaaaagaaaaaaaaagaaagagtacaaaaattagctgggcatggtggtgcacacttgtagtcgtggcaacttgggaggctgaagtgggaggggttcctgagccacacactacacaccaccacactccaaccttggcaacagagtgagaccctctctctaaataaataaataagtaaataaataagccctttctgctgagtgcaaattggtacaaccactgggaaaactgtttgacaatatctgtgaaagctgaacatatgcctatcccatgacccagcaatcccactcctagggatatacctaagagaaaggagtacacaggccactcaaagatgcacactgaatgctcccagcagctttatctgtcatagtgaaaaactagaaacaacccaaatgtcatcaatgataggccctagaaggacacaggaattaggttacccatgagaggtagctggtttaataaggtcctgttcaacctaatgcctgtgactgcccagtaatccctctactataccccatctgctcactgctgtatccttaatcgcccagtgtccccagcccttcctcttggagtgctaacacatgcacaaatagatcccttggtggtatattcataagaaggaatactacatagcaatgagaaagaataaactacatttacatacagcaacctgcgtgaatctcatagacaggtttcatgaaaggagacagacatgaggagacacactgattccattcatctgaagtttaagaagaagcaaaaccactcttgggtgatagaagtcagaatagtaattacttctgtggggttgggtactaacggacaaggggtacaagggaagcttctaggggatggaattattttatatttgggtggtgattacatgggtgtgtgtgtaattaaaaattcactgggccacacacttaagatttgtgcactgtattgtgtgggttctaggtgtgttaatacaaaataatgagatgttgaggtgggagaattgtttgcggccaggagtttgagactagtctgagcaacataacaagacccccccaatctctaaaaaaaatttgttttaattaacagggcgaagggggcacacctgtattcccagctacttgagaagctgaggcagaaggattgcttgagcccaggagtttgaggctgcaatgagctatgattgcactgctgcactccagcctgagtgacagagcaagatcttgtctctgaaaataacaataataatacaaaatacaaaacaaagtatattatgcacttgtcagcctcactgatcattgcaagagccaaggatgagaaaagatgaggaatacaagatcccagccaggaggtgagatgaaactggggcctgcaggggctgctaacacccatggagggggagttctaagccctagaaggacacaagaatcaggttgcccatgagaggcagcggtttaattaggtcctgttcaacctgacacatgtgactgtccgaccataatccctctgcgatgacccatctgctccctgctgcatccttaattgttcaatgtcctggccccttccactcactaaccctcacacatctcatgcttgatcaaaactagttctcgctggaccctgccttcctgcctctctccttcctgcctgcctctctccttccttcctgcctctctccttccttcctttttctttcttgagtggtttcccaaccagttgtgcccctcccctctcctcaccagctgctcccatgaaggtcctccaaagcttcccatcggccaagcccaggggctccatggcttgctcatcccccatccaaactctctgctcacagcccatgggtgaccctgtccacctgctggaaacgccctcctcccttgcttcccagagcaccttctcctgttctcctgggacccccttgaggaccttcatcagtctccttggtaccttctcctgctcccctaggacccccttgtgggccttcatcaacatccttagcgggcttgtctttctgcatccagtgcctatgtctggcgaggtccaggactcagccccaggcctcttctccttggcattccctcaggttcctggactgtgtcctccttcccagcctggcgttctaggttagacgttggtctctgagctgtagcccaggccactaaagcaccctggctagcaaccatggatggcacttctcagcccccaccctacttggggtgtaagcagatggcaaggccctctatgcatctccgcctcagtccccagagcaggtggctccggaaatcccgttggccctcctgctcagctggctcatgtctggaacctatcctgacattgtcatgtctcccattgtgttcttgctgggcctgctcagcccctttggtgcagaggactccacctgcagacttactcggttactctccacatggtggccggaggatctttaagaaatggaagtcagttctcagacccacaacgccccccactgcagttggaataaactccaacaaggccctgtgtgaagtgcctctgtttcccactccaccctcttgctcccttccccttgctcgctggtgcagccacactagccttgttgcccgtcctggaacacaccaggacatggacattatggggacatgcaattcagcccatttacagggccctgctttacaggatctctgttaatgggctgaactgcaccccccacaattcatgtgttcaagtcctaacctcctatactccagattgtgaccttatttggaaatagggttgtgcaggctgggcgcggtggctcacgcctgtaatcccagcgctttaagaggtcaaagcgggtggatcacctgaggtcaggagttcaagaccagcctggctaacatggtgaaacctcgtctctactaaaaatacaaaaattagccaggcatggtgagacatgcctgtaatcccagctactctggaggccgaggcaggagaatcgcttgaacccgggaggcagaggttgcagcgggccaagatcacaccactgcactccagcctgggtgacagagcaagactaaatctcaaaaaagaaaaaaaaaaaaaaagaaatagggttgtgtagatgtaattcattaagatgatgatatggtttggatctgtgtccccacctaatcttatgttgaagtgtaatccccggtgttgagggtgaggcctgatgggaggtgattgggtcacggggcatgggggacatggggcggttcctcatgaacggtttagcgccatccccctcggtgctgttctcataagttctcatgagatctggctgtttaaaagtgggtagcgccatcctactcccttttgatcctgctctggccatataagacaagcctgcttccccttcacaccttctgccatgattgtaagtttcctgaggcctcgccaaagcagaagctgctatgtttcctgcatagcctgtacaactgtgagccaattaaacctcttttctttataaattactcagtcttaggtatttctttacagcagtgcaagaacaacctaatacagatgaggtcacactggagtagggtgagcccctaatccattatgactggtgtctttataagaaggagagatttggacacagacgcacacagggagaacgccatgtgaaggtgaaaatggacgtgctggtctacaagactgggaaggccgaaggttgccagccaacctccagaagctaggagaaggcctgggacagattctccctcacagcccccagaaggaatcagccctaccgacaccttgatcttggacttcttgcctccaggacagagacaatacctttctgatgttgaagccgccagtttgaagcacttattctcatagccttagcaaattaagacagtacctctgacagggatgcctccctccccgaatcagcacatgacttactcctcgtgtcattgagatctcggacagaaagctaccttttccaagaggccttccctgaatatcccgtctaaatggcttggccccttccctcacccattgcaagcgcaggctcaggtcatcctccagcctgtcgccctcatcctgcatgttcgccctcacacgcatgaccacctgaagacagagtatgtagtcatttgcacacctggttttttttgtctgtctcctctgctagtttaagagctttgtgtggtccagggcttctggcatcttctgctgtgtctcccgtgtctggcacaggggctctcaggtgagatcaccatttggatgcttttagccaatcagcaaatatttagtgggaatctatgctggggaacaaaacagccccagtccctgaggcagggcagggagggaagtcagtgttttgtggaaagcaggagaatgtatggagtagttactggggaatgtggagggaagcgtctagagagacggggaaggacaaaggcctgtttgtacccggtgagctggagctgcagctgagcgaggcatctgctgcaccaggcgacttctgatgctcacatcccttgggtgtcccccagcccaagatgtcctaaaccaaacctgtcatgttccatggaggactctcagttcgcctcctgcaagggatactacaaacacccaccaggtctcctgggtgggaacctgggcacaagcgtcccattgttctccctcctgtaccccacatctgatgggccagctcatcctgtgcaccttcaatcccccacttccaatgcttctcctccaccctaatgctagctccttgaagccctcaaggattcatgacatccaggtggctgtggtggcctctggggagggagggggacactacatccataaatgtattaatttttcaattataatatcgaagttcaggctgggcatggtggctcatgcctgtaatcccagtgctttggaggctgaggcgggaggatcacttgagctcagaagtttgaaacgagcctgggcaacatagcaagatcctgtttctacaaaaatttttaaaaattagcattagcctggcatggtggcacaccttagtcccagctacttgggaggctgaggaggaaggatcacttgagtccaggagctcgaggctacagtgagctatgatcgcagcaatgcactccagcctgggcaacagagtgagaccctatctctaaaaaaaaaaaaaaaaaaaaaaaaaaaaaaaaattaagtttatataaagagtgtgagtgtctgacggcagttttccccttctcaggggtcaaaacccttcacaagactcatgaaggccactccccaaagcagcaagagttgagggtccaggtgctgtgaaggtggcagggatggtgctggtgggagtagcctggccagcccctcttgttgcacggtgatgctgttctaaggcccacttgagaactttacctggctccccgaggatgtacctctgaaggctcaggcagaccccagggcccattcccaccccttcaaactgccagagactgtcttgggggtgcccactgaccccttgagcccccttgctctggttccatgactgtgatgtgtactagacaacagggctctgagtggcctccggggcatccgctatagacagggaaggtggcctaaggatcccgagagtccactgtggtcagggcccaaattgctggaagaagggagtggtggctctgtgcgagctctccccgaaccacctgcccactatttctacggccacagagactgaggcacagagaggggtggccatctgcctggagtcatggggtgaggcaggggtcactctgtcccctgaggcctttaccctgaaagtgatccttgccctgagcccatcccataaccccatgggcttcctgttagtccagcacctgcctccagagttgggggcttttgaggcaagggagggcaaacttgccctgagaatcctagtcctactgcatgcagcctttatttcctgatcccacaggaactccaggagtcaggagccctccctgtcaacagcctcttctcccctaccccacacctaccctcccccaaacccagcctctgctcactatgtcttccttgacaccccaattggttttcatcattttttttttaaagattgaactgcatttcagacatttgcatttcatgtcagaaaatgtgaattcagcagccgccaggatgaatgccagtcgccaggtgctgagggtgaaggcgagggccggtgtctccagctgtggggcaggacaaagtccctgtgatgccagctgccaccaggacccagggacaggcgagagggccccagaagaatgccgagctcacgttacttggcagaaagaaaatgattcaattttgttctattcaccgaaacacatgttcttgtccaaagctaatttcctgctgcccccagcttgattgtgtctctgtttcgtctctcactctgaacaccgtcctcttcttaagaatcttgggattctgaactgcttttctatttccagaattccacattgcgattttcatttttctgtctctggaaggatgtgccagttgcctttacaaagggggcctgagaggctggaggagacgggcaggagggagacttttctctgggtggccttttgtggattttgaattttgaaccatataaatgtactttctgatttaatgaaaaacatttaaaaattaaaaaattgtttccacttaaaaataatacctttcgggaccctgctcccctgtctctcccccttgtccctctctcccttgtagctagagccttcactgcctccctttttacggctcctctgccttcacccaaggctgctccgacaaggatccccccaaagcctccccagggccaagtcacctcctctgccctctctggacacagcccatggccagccagttcaccttttggaaaccctcctccttgggttcctgtgtgtctcctcctcatgtctgtcctctggccctcccttttcaatctccctggggggcccccaaatgctggcatggtctgggcctctgcctggactctctcccacagtatcacccacccctgatgcttcgacaccctcctggacccagtgacctccagtgtacactccacaccaaatcaggtccttccctgcttggatccactcttacccctccatccctgccgagccccagatcccggatccacctgcctccttgacaccccatttgtttacttcagggacctcacatcaacacatctggatgggctggcttcaagtctgaactctgccacctccttgttgtgggcaagtttctcaacctctgtgtgtctctgtttccttgtgtgtaaacgatgatagatgaggtagtatctaccttatggtatagttgtaagtatgaatgaattaacattaagtaacactcctagaacagtgtctggcaaatcgtaaatactaaaatgcatttgttggataaaaatgtcccaaatggaactcctgattttcctcttgcaaaccttatcctcttgcagcttcccttcccgctgccattcaacccattctgaatgccagaaacccaggggtcttgcttgacactgccctcctcttcctcctcctcctcctctgcttctcttcccccagggtgcaccccatccccaactctggcccattttatttcctaaatctctctccatctccaccctttccctggcccatggtcccctgaaattgctcttgttaagctcatcagtgttccactaattgccaaatcaaaagaaattttcagccttcatcggtttggattttctgctacatttggtcctgctgatcttgctctcctagaaacgcttcactagcccagtttccatgacaacctgctctccagctctgctcacgtggccacgtggcactgacatttctttctctccgttgcttttgtaggtgccccaggctctgccagcccctgaaatgatgggttggaggtccttagattccaacaggactctccctacctctcagtctccccaagacatggccaccccaactctgcagctctggttgagatgtcctcctgaaagccagactgctggacctgacttcccgctggccatgacttcctactggccatgacttcccgctggccatctcccccaggtgtccgcaggccccacaaagtcaactttgaattgtggccattacccctccctaatccacttgcttctccaagtcccagtgagatcgtcataagacaaatatctgcctgtggctcttacctgctcaaaacccttccacggcatcctattgcctacaagattaagtccaagatgttgagcatctttttgtatgttaatttgccatctgtttatcttctttggggaagtgtttgttcaaatcttttgctcatttcttattgggttgtttttttttttaatcattgagttttaagactcctttataaatattctggatacaagttctttatcagatatatgatttgcaaatgttttctcccagtttgttgttcgtcccttcattctctcagcaattaaaagagcatacttaaaaaaaatttgatggagtccagttgatcaatttattgcttcatgaatcatgcttttatcatttcgttcttttatggtgttgtggctaagaaatttttgcctgacccaaggttatgaaggttgttctcttatatgttttatcctagaagttttatcattttggttttacccttttattttttacttatatttttatgcctgagttagagttgggtttttggtattgcaaagaagggagaccctgctaatattgtaatctatttgaaaggtgaagcttaaagaccttcaatggctcctcattgctcttgggataaaagtcctaaactccctagcatggctcaaagggcctgcatgaacttcctggcctgattcccaacccttttcctttctggcccctcatggtgccctgtgctctggatgtacacactgaatggcaattccttgagctcaatgcccagggcaattctttcttggagctttagggcaggctggatcagacagccaggctgaagcaagactccattccccctctcctccagatatgaagttgttttttatgtgagactacacccaggaccccacttgagcatcttccatttatttctctttcccccatcaaagctgacccatcctgagccctgtgcccttaggttcagggtcccagtgcacttcctcccagtctttatttggatgttcttttctgttttccacagctgagattatatcctgcatataatttgcaccctggcttctcagttgctgctccactttttatattataagaattttcgagctttttgtaaaaatacaattagtggatgaataattgtccatttgagtggatataaaatgatttgcttaacatttcctctatagttggttttttgggttgcttccattttttattagaaacaagggcatactacatctctttgtacataaatctttgtcgatttgagattatttccttctgatggagcaccataagtgtaattactgggtcaaaggctgtggtaatttacattcccatcagcagtattgtctgtttcatcacaccctagccagcatggggtattctcattaaaatttttttcttcactctgtgatgggcaaaatgtgttatctcactgttgttttaatttactttttaaaaaataattagatattggaaaatgggttcaacctatgagccataaaaaattaatcttctgttaattgagtgttcatcccttcacacttacccagcagtgatttgaatttttaaaactcaatttgtatggattcttaaacaccaaggatattaaccctctgcgtgacatcctcggaagttgttttcaatttccacacagttaaatctaaaatttttaatctattttcttcttattttctttgtgattgcttcccttgcttttaagcttagaaggctcactgagagtttggggtgaatattcacttctactttattcaagtgtgatttttaatttaaatctttaatccatctgaacttgatgctgatgtatgacatgaagtgaagaatgagtggatttgcttttccaaatagcttagcgatcgttccaacaccatttattaactaagcccttctttcttcactgcttcatggtgtcccttcttagctctgtggagtatggtaatatttttctgttatactgtgtatgggtttaatatcctccaccctcattcttcgccccactgtccaagcttcctgggtgcatggtttttggggtgctgacattacatagagtccctggcttggcctttgagctcctctgtgggcttttgtgaatctgtagcacaaaccacaattgtgtggactattgtccacaggggagtctacaggaatgaaagccatagcttttcaggacaagagctgggacttgagaaaggaagcattctagattctacaaagcttggaggatttggagttaaagctaaaggaagaggcaaagagcttatgcatagacaatagatggaaaagacagttcacgatgatggtggagcctgagccccttgaagggggtaagagttcaacctgtgggcagaaggagagaaatccaaggaaattcaagcagaatattagtactggctggatcccccagaaaaggctcatcttccagtccctgaactgaatcccaagggggaatatgatggggtcccagacaagtctgggggattccagagcagaagccttaagtctaacctggtggttacatcaaggggagcaaaggcagcagaattccctgagcagccttgtggagccgagctggcactggagggtgtctgggcttggttggggccaagagtgagcttgccgacccagggaagctagggtttgccaaattcggggagacagagcctgtggttaccaggaagtgaggagggaccagaagaggcaagatcctgccaggcagagcagagcagtctatgtgtcctgttgacactgtggcattcacgcccatcacacacaagtcgcctttccctgagtcctggagcttggacctgcaccctgccactgtcatctcattgatgtagttttgggttatattttgctagctgggaaggctggtcaaacctcccactccagacagccttctggtgaatgccttctcctcatgacctgcaaactccgctttcatctttcataactttgacttctgattgtggactagattccccccgaagtcaagttctggacatgaacctagttggagctcactctgggatgtagaggggctgggacgctggagtcagaggcaagaggcacagaggttgagtccgctacctgccactagcgtgccctgaggccttccacagctagtgccctgtgcagagtctcattttcctgctttgcttctccgtggaatccctgtcagcctcgtggggtttgtgaggatcatataaaacttagctctgactcaactgtgtaaactgtgaagtcctgtgcccacgctggggtgggtgatcctggttctccctcctgagcagacctcctgtcccataccccatcatccctgcatgacaaggatgccaaccacacaaccttctcctccaactctcctggcccctccttcactctgccgtgcaaaattaagcaaacacacggaatttgtttgtttcgataatcacaaactctttttggctaaaaatttttgacctcccatttcagacattttatttcaaatcagaaaatatttgttcaacagccccagttggctgctccagactggggaggattccaaaacgaatgagacagggtcctggccatggagtgggatgaaattcctgccaaagggagacacagttaaaacacaaaggtcatatacaagttcccagacagaaagtgggacgcagattactcagtaaaaggccaatcgagcgctgtcccaggaggttggatgtgtgttaccgccagggtggatccctctcgtccatgtggcctcatttccttggaggcctcatttagctaattgcctctgctccacagtaactcatatcccacaggtaccttcctttgggaaaattaatatgcaaatgttgcccttttattaaaaccaaaatgaagcaaaaaattctgcccccctttgttgactctcctctcttgacagatagaccctgtatcaaccttgctcctgacccacccctccgcatccccgaaaaactgacaaacggccctgaaggccaagtccagggtcaccaatcaacttttacctcccctgagctccctgccactgccactgtgtccttttggaaactctcttccatgggccccagggagtcccccctgctgctttcctctctggtccttccttcttggtgtcctcttcccttacccagccacctgaacccgagtgctcgcctgggctcagcctctgtcatctgctcattcctctgcactctgttccttaatctcacccatctctgagctgcttcaacaccgcctccaccccggcttggacccaaagcctctgcaatgtccaattccagcccaagttctcctatggactccagaagccacaagtcccaaaggcacctcatgctcaactgactcaacagacaactcttctcatccaaatatggtgcttcaccagagtcccacatctcatggagagatgccaccagccagtagacccaggagacgcctggcatcttcctccacagctcactggctctcaccacctacctccacagtccagcctcaagcctggagacttcatctcccagtggctcctgggcccttccagttctcttcagctccaccccctcctgcactcctgccatcgcttcctcgctagaagccagagtgattccttctttccttccttccctccttccttccttcgttccttccttctttccttcattccttcctttcattctttcgttttccttccttcctttcattctttcattttccttccttccttccttccttccttccttccttccttccttccttccttccttccttctttccttccttccttccttccttccttccctccctccctccctctttccttctttccttctttccttcctctttctgacagagtctcactctgtcatccaggctggagagcaatggcatggtctcagctcactgcgttctccatctcccaggttcaagtgattctcctgcctcagcctcctgagtagctggggttaacaggcatgtgccaccacgcccagctaatttttttttttttggtattttttttagtagagatggggttttgccttgttggcgaggctggtctcgaactcctgacctcaggtgatccacccacctcagtgtcccaaagtgctgggattacaggcatgagccacggtgcccagcccagagtgatactttcaacatgcaaattggaacaagtcattgccatgcttaaatgtctccaaagactccccagcattcttggaataaagccccaaacctttccagctggctggctcttccattcagattttttaccctgcttcccctcatccactgtgttccagccttactggctttcttcccctcccagaacacactctgcccctcccactgctgggcctttgtctgggctgtttcctctgcctggaatgctctttctgattcctcctagcctggttgatacccactcatctttcagatcccttctgggggtctcctcactgttttcagcaccacacacttgtccttcatgagtatcagtgttgctaattatccttttattcatgtaattaattcacatctgtttccccttttaggggaagcaacaggagccccttttagacaataagctccacatgggcagggatgtgtgtctgtctttttcacatggtctcatcaacaactagccagcacacaagaggtgctcaaaaaatatgtgtggaattgagttgaaaactttctcttgactccacatctcactttcgagctcccagacaatctttctctaaacttttctaattatcaaaacttaattatctaaacttctgtaaaagggctgtcttcactgactatctatcatcctcaggcactgcagtcggggttctgctccatcacacccctgaaactgctcttgctgaaggctccgataacctcctaattaccaacttgagtgggtgtttttccaaccctgtcttattggaattctctgcagggtttgatattgttgatcactctcgccttctcgaaatgctgggctctcttggtttccatgacaacaccctctccttgtttttaacccatctctatgacgacttttccttcccagtctcattaatcagaacctctgactcaaccacccttaaaatgttagggtcctgaacatttgatattgtaaagatgtcaattctctcaaaattaatttagaaattcaatgtcttcccatcaaaatcccactaggatgttttaatggaacttaataagctgattctaaaagtcatatggtacaggagatgggcaagaatagccaagataattttgagaaagaaaaacaagtggtggaacacagtaggggaaaaaggactggatttgccctactaggtagcatacgacaaagcaacaaaaggattaaacagtgtggcaatggcacagggatagacacactgacctacagaactgaggagctcaggatttgacctgtgtccagagggaatttgccatatactagaaagggcatttcaaatgatggacattggtcaccaggagcctgaagctccctccctgttctttagctctgaggttttttgaagaaggcccacccaggcagcctcctcatgcagaaccattttctttcctttcctgcccaacccctccaagccctcaccccttcaaaaattgcctgatgcaggtaccgtttccttaagacctagctcttatttttttcttctttttctattgtaaaaagaaatacatggatggatgagtatattgtattcattatattggttagatggtgagtatattgtattcattatgttattcttgttctcttctgcacttttgaaatatattatcatatttctctaacagtctaagcaaaataaataagggaaaaatgaaatatattatcataaaaacagcgatatccaaatatggcagaaaatttggagagaagtaagtcatgaagaactaaaacatcttgacaagaatcccaacatccattgtcaagttctgtaaaaatgcgccggaaaagcacatctcttcttagcctttttaatgcatttatttacaatagatgctttcattgtatgtaattttgcaccatccttttccattgattatatgctaaacatctccccatattagtcaacttcctttgtaattattatgtttaatggctgcctaataatccagttaatgaatggaacataatttggttaactgttctcctggagctgaagattttgataacttccttttttcttttttgctatgacacctaaagccacagtgcacatctttctgcagaaatctttgggcattgctttagagcacttcttgggatgagcttcctgcaaatggaattactgagtcaaacagtacgaacctttttgaggctcttcacacatcttaaacaaattgccttgtagaaagattttgccacttcacagtcctgccagctgtgcaagagagggcccatgccaccggggctgaatgagctctgtgagctcttgctttgtaaagtactcattcgatgggccaaaagtggtatccctgcattcaaatttacatttattttattatgagtaagttcaacattttcaactgaatttgacttttgaacttcatctttcataaatgggctcttacagccttttatcaccccaatgtttcattatgaaaattcttactgcctctgtgaatgttttatttatgagaatttccaacacacagaagctttacatttcctatagtcaattatatttatattttccagcacagttctctgtattgctgtaaatgctacaatggccttcctcgaccatagtttggataatgaatcatttccagttttttctagttattactatgctttcttttttttttttttttttttgcatttaaatcatctgacatggccggacatggtggctcatgcccataatcccagcactttgggaggctgaggtaggcggatcacctgaagtcaggagttcaagaccagccgggccaacatggcgaaaccctgtctctactaaaaatacaaaaaaattagccgggtatggtggcgggtgcttgtaatcccagctacttgggaggctgaggcaggagaaccacttgaacccaggaggcaggggttacagtgagccaagatcatgccattgcactccagcctgggcaacaagagtgaagctctgtctaaaaaaaaaaaaaaaaaaaaaatcacctgacacttactgaaaagatgacatcaattaaaaagtaaagaagacaaaaaaaaaattgaaaaaaatttaaataaatcacaggacattgatgttggtggttggtataaagagagataaataattgcttttcgtttctgaaatagataaaataattttccagcctcactaagtgacaaatcacttcattccccctgcctgcccccattcatttgcagtgcctctgctctcataagtcatagaattagacattctagggatctgcatctgggctttctattctgtttcattgagatgtctttctttctgttacaaaataatggttattttgttttgttttattctgcaatgtctgttagggttagaacccttgaaatctctgtttcatatcagatcacttccccaagcatctaactcccacacccaatttcccttttggtaatctaaccttgaatttcccatagcatgacttttttacacaatacatgtttttctagctacctcctctccctggagatcacatggtattgttgtgctccataggggcaggccagtggtgcactcaatcctgaaatcttggaggcacggtcaggagatatggctttgagccacatccctgccagtcatgcactgtgttgggccctccccacgctactttgtcttgggacatctcagcttccttttctgtgaaatggggttgtcaagaccacgtgagatagagaatgtcaatacagccttattcttcactcaacaaatgtgtgctaggtgccagggataaaagagcagccagggtagaaattgtctctgaagaaacagccttcaaggagcttacagtctattaggggagagtcctctaaaacagaggaaaaggcagttgccaaagaagtgattgcaaaggctgtggaggaagcaaacagaatgtgagggagagcatggggtaggagccccactttagatgggtggttggggagggtctctcttgggaaacatttaagctgagcccaaaagtctgagaagagggtggtgggaaagtggtttccaggtatgaggagcaatgggagccaaagctctaagagaggaatgagcttggtgcactggaggactagaagaatttgcttatgggtcgggtgcggtggctcatgcctgtaatcccagcactttgggaggctgaggcggccggatcacctgaggtcaggagttcgagaccagtctgaccaacacggtcaaaccccatctctactaaaaatacaaaaattagctgggtgtggtggcacacgcccgtaattccagctactcaggaggctgaggcaggagaatcgcttgaacctgggaggcagaagtttcagtgagccaagatcgcagtactgcatgccagcctgggcgacagagcaagactccgtctcaaaaacaaaacaaaacaaaacaaaacaaaacaaaaaaaggctactctggctgctctgtgggggttggattattgggaagaaagttagcaagtacctgcagtgaccaagcaagagatgacggcttggactgagccattggtcatgatgatggagttggttaggaggtaagatcaactgacctttccatgagatgttgcaagagaagaaggcagagattctaggggaccgctaagtgtctcccaaaataggagacatcagtcaagaacaaatttgcagaagaaagattaggaatttgaattaaagagcataatgaagtgaaaaaataacaaaccaagaatttcatttgggatatgttgttgatgtctgagatggttggccatcaggttctggagctcagacgagagatcagggctggatctggaagaagatgtagagaggaagatgggtgtgttggactggagcttaaaggagcccagtgtggactatcagttttgggaatcagcctctaggagagaggcaaagcttcaaggatgcatgaagttgagggaaaaggtgcacagtgagagggaaggctggagtctgagccctgggcagcaccagcattggacagggggaggggagcctgagaaagaggggaagacagggaaagagagtcccagaagcccatgaaggaacatttccagaaagagagtggccactggtgggccacatgcacagaggtcagtggaggctcaggcatctcctagacctggcctttggggacttttgtcacagcaactttggggcaaggggcagaagcccctgttggtgttgggggaatgaactgggtctggctgagaaaggagggaggagggttggagcaggcagcaggtccaggaaggagctgattcttccaggagacatgggagggaggaagcagtacaagcccagttggaagagcagggcagggcagtgagaggggccctggagctctgggattaagtgtagaggtgaagggattagcagtgttggtgaaaagggacaaaagtaaattatgtacattttagcaagtaacctgatctccatgttctttgggaggccttttctctgccctctgggtactgactccagctctagttaccactggtttcatctgcctcatggctggggcaatgtctttctcattttcttgtacctttcagcacctagcgacaggcagccagctaggtaggagcagaataattattttctgcttgaaacccagtgtctgaaatggagattcagaagtttttctttgtaccaaaaatactttgtgacaaccctgaggaagtgagatgacagggaaggaggtgttggggtacatggggatggaagggctggagggctggaaatgtcaccaggttaatttcatggctgggcaccgggagatgtgattggcaggggaggaagggctaggactactcaccccacacaggcctatctcttcacagccgatgtgacgctgcccagtggcctggcctccctcaacctgttcactgctgctattctttccaataaactccattgcccaatccaacagacttttccgtctttaactcacttggcctggcgggagcatctgacatagccaaccactccctcataagagtggctctccttggcttccatgacaccaacatctcccagttaacctcctgccccagtggctgctgctcctgcctctccaccacttgctgcccactatgtaaatgttgaattccctcggggcttgtgtctgggctctttgtatccctccctcccttccttccttccttcctccttccctccctccctctctttctctctttcaacagagtctcgctctgtggcccaggctggagtgcagtggcacaatctcagctcactgcaacctctgtctcccaggttcaagtgattctcctgcctcagcctcccgagtagctgggattacaggcacgtgccaccatgcccatctattttttgtatttttagtggagacaaggtttcaccatgttggccaggctggtctccaactcctgacctcaagtgatccacctgcctaggccttctacagtgctgggattacaggtgtgagccaccacacccagcctctttgcatctttgtctgtattctcatcctgagtgattactaatgactctaatttcatgccctcagctctgccctctcaagggcataccacatacccaactaccccatgacagctcaatccgaatgtgaactgctccccaaaactacaccctccacctcccaccctcacttgtcttccccttctctgcaaacggcccaaccttcaacccagtttcccaaaccaggttcttcagcatcaccttggctcttccatcgtcctctcccctcccatccaatcccagcaaatcctggcagttctgtctttggggaatcttgcccaagatagccttctctccaccctactgccccatcctggttccagccacctcccatctctcatcttcttactgtgatggcctcacaactttcttttcttcctccttgcccatccacttaccacaccgaagagcagacttcttaagatgtaaataggatcatgtcattttctttcatatcaccagccttcagtgaccttccatgggccttagcaccaactctggtctctttctcaaggcctgcaagactcacctgctctgccctgtctgtctcttccatcccccttgggtgctccaactcactgtcctccagccataagcaaattctttttttttttttttttttttttgagactgagttcactctgtcacccaggctggagtgcagtggcgcgatcttggctcactgcaacctctgcctcccaggttcaagcgattctcctgcctcagcctcccaagtagctgggactacaggcgcccaccaccacacccggctaattttttgtatttttagtaaagagggggtttcaccatgttagccagggtggtctcgatctcctgacctcattatctgcccgtttctttcatttctgatcattggcatggtggacacaatgcctggagtgactactgccatcctgtgactgtggggacaggagcccatatgctgagcttgggagaactgaaggatggacagaacatgggtccttaatgacattacatttgtctcccttgggacttctcattatatgtgacaataaatgtctcactgtttaaacatttttgagttaggttttctgccacttgtgtcaaaatcacctttgctgataagtgcctcagccctaatggccttctggctcctggaacatgccaccctccttccatggagcttcacccctgctgtttcttcatgtgtccttctcatcctcattaacctccatgcccctggttgaatgttagttctctgatatagcagggttcctccatgccacctatcacagtttacaattatggacttctttacttttttttttaataattttttttgagacagagtcttgctctgtcacctaggctagagtgcagtagctctctacatcatagctacaatcatagctcactacagcctcatctcccaggctcaagtgatcctcccatctcagcctcccaagtagctgggactacaggtgcgtgccaccacactcggctaatttttttgatttttagtagagacgacatctcactatgctgcccagactggtctggaactcctagcctcaagtgatccttccacttcggcctcccaaagtgctgggattacaggcgtgagccatggtgcccggtctctttactggcttgattaacatctggctcccccactggtgtggcagctctacacaggcaaggcctagggctgtttttgctcaccattgtgtaccctcccactgtgaaggccagagagcttagacaagttcacttactcagccggggacctggtaggggagagagacagtgcattccaaaggattaaagtgaagctaatttaatgaaaggaccattcacagagtgtagcaggctccagggttgatcaagcacccagggatgagcaacagctggaagctatcacacttctaggtttgaagagatgagagaaggatatgggctttcggaacctggagagaaagctgctgctttcagaaagagaccccacctgtggccatacgaaaaggaatgcagacactgccaacccacagccaaaggaaggtggccagagaagctcactctcctccctctctccagcgtctccttgtttcctccattggtcacactcaactacagatgcttcttgacttatgatggggctacatccaaattaacccactgtaagtcaaaaatatcatgtcattaaatgcttttattttgttttattttgagacagagtctcacattatcgcccaggctggagtgcaatggagtgatcttggctcaatgcaacctccatctcccgggttcaagcgattctagtgcctcaatctcccaagtagctgagcctacaggcatgcgccaccacacccacctaatttttgtattttcagtagagatggggtttctccgtgttggccaggctggtcttgaatttctggcctccagtgatccgcctgcctcggcctcccaaagtgctgggattacttacagtcttgagccactgtgccaggcccattaaatgctttaatacccccagtacacccattataaagttgaaaacttgtaagttgaaccatcataagtcagggaccctctatagaagccagaaggcatggagtctgggtagtattaaggttggcctcccaggcacagaacaggatggaggatagagtatggctcttggaggggacagcaaaggctatccggaccagtcaccaaatgacctcctagctactcatttcaatgcacccttttcctttcttaaccaccctacagaatttgataatcaattttaactttttcaggatcagaaagtgcaccacaaaggtcttttccatgctttgctctcttcccttgagacatctccaatcagacccacttgtttcctttcagccgggctcagaggatagatcccagctcacttacaagtctttcttcttttcatcctcatcctctttcaagaccaggaaattctagggtttctcctgttttcaaaaaccctcccttgatcgctcacatttttcttgctaccattcaactccttccctagtcatccaaccttctctaaggaaggttctgccactcctccacctattcagtccgttgaccctggggaagctagcttttacccctttgcccccaaaacagttcctgccaaggttcataggagcccccgattgctggattcaaaggactttctgcttcttatttttctgagattcggggcatcgagctgtggtgattactttctccctgaaactcttccctatcttggttgctatggcaacctcctctcctagttatttgtctcattgctcaggtccttccttttcctctctcctttgtcacccacccacacctccgtcagcccctcacatgtctccgggactcatgatgctatgagctctctcccatcttccctctacactctccacctcccatcttccctctacactctctgcctgatggtcttgctcattcctggagtcccattaacttctgtccccaggttggtccctccagtcagatttcttcctgagtcccagctctggcatccagctgtctgctaacctcctcctggctgtacccccggcccctcatctctacttctctgagactgagcccattccccccacccaaactggctaccatgctgtgttccccatctcaagcacctcctcaccatctgccaaggaacccaaagacacacgagaatcacccttggttctaccctctctctcaccccaacagccaacaatccttatgcatttctgactttattttctaaattggtctccctgcctagagactatcttcttccaaatatagtcttcacactgaccatctcagtggtcttcccaaataacaaatctgaatgcatcactctagtgtaaaaactttcaacagtgcccagtgactgcaggacagtgtccaaactccttgacatgggggcatccaaggctctgcagggtctggtctctgtccacttcatcttgctcttcccatcccctccttcttttgtcatagtccaggaacaccaaataccctccagctcactcctgctgctcctcattcccaaggctatgcttgtgctgttccctctgtttaaaaggtctttccagttccttctagcttgctcattcctgctcatctctaaggagataagtcaccctaagaccaatggtcacctcttctggaaagttctgtgcatatttatgtttcgttactgcacttaccatactgtactatgatggtccatttaaatgctgtgtagtaggatcatattttatatattatttgatgtgcttccccaccccccaccacacttccttgcccatcaccatgttggtgcacaacaaactacaccaaacattagtggcttacaaacacaatttattggccaggtgcagtggctcacacctgtaatcccagcacttcgggaggccgaggcaggcaaattacttgagctcaggagtttgagaccaggctggacaatatggggaagccccatctctatcaaaaatacaaaaattagccaagtgtagtggtgcacgcctatagttgcagccacttgggaggctgaagtgggaggattgcctgagcttaggaggtccgacgctgcattgagccatgattgtgccactgtactccggctagatgacacagaaagaccctgtctcaaaaacaacaacaacaaaaacaaaaacagtttattattcctcatggttccggggttgatagggctcagcaaggtggttcttgcttaagtgtttcatgcagctgcagtcagatggcagctggggctggagtcatctgcaggctcattcacatagttgacagtcagctgggggcttgctgagaccgttgactggagtgaccacatgtggatttaccacaggacctgcacttctcatagcatggcagctggcttgtaggagggagtgttccaaggccaagcattgcaagaggcctggcagaggccataaggcttcctgcgacctagtcttacaaatcccagaatgtgccttctgctatattctattggccaagaaagtcactaaggccagcctagattcatggggagggaattacacttctcttcctgatacaaggagtatgatatatatcgcaggaaggcaagtattggtggtggccatctttggagactagctaccaaggtcactttttcctgattcagtcagagctttgcaggatttgggttgttgcagcatgaatgcagtgagaaagatggtcagtagtttcaaagagtctcttgaaacttacagcagacaggatgctttgttgcagtagccgggcttttgtaaagaggaaagagcttgagggactgagcacttgaaattgatgccagaatggtaaacagggaagaatacagaagctgtttttctgcctaaaaggaaataaaagtttgaccagctagtgggaataaaggaatcacaaagagatgtagctcatagtagatactagagctcccagagtaaatttgaggtatcccagagcagaagggactgttgcctggctcctcaggtgttgcctgagagaacacaagctcctggcatgggctggagagaggctgaggacccctggtgggagaaggtggctgggaggtgtcctccagggtcctgtttgtctttgtaacacggtggtgatggtgagggtgtagagaagagggtgagtgtagccggtggacttggaggtgcctcatggtcaggacaaagatttagtagggattctgtggctcagtggatggcagtggatagttgctggcagacctgaatcacttgtatgcccctggtgccaggtcagaatagaagctcccagaacactgactacccacaaggagaaggagcagtgggaagcagaggagctggaagtggaccaagaatctacttaagatagtcttttgaaatgtccagatgtggctgggtttaccttcaactaagtttgtgctactgagcagaatggagtggcagtggtgttgggaagagttaacctgagtaatgaagcaacattttggagaggctctgtttgtaggtttctgggctagcacctggggccaccttcaacctttcattctgtctcatctctcccgtgcacttggcaccatgccccctatttctacctccaaaacttctcttgcctccgccttctctccatctgcactgttgcttagctcagacctgcgttatttctcacctggacaactgtggtgcctcttaggtacttccctacctccaggctgttggggcctgatcaaacccttttctgctggcagccagagggatgacctctgttctttttctagaactgcgccaatccttcttggaaatcattctgcaccccaacctatttgctttgaaattcaccttctcatttattgcacaacccactttaatggccatcattgatttgccagaggtgaaccccaactcaactgggccaatggaagcttttgtctagatttctggacttgggaacagagagagctcataacatgtatggagcacttagtgtccatccccgaggtaagtacttgatggacatcatctcctttgaccctcacagcattaagctggtgctgttgttatccccatttcctatgtgaggacactgaagacagagaaattagacaaaacaatgagtaagcaagtagccctgatgcttaaccaagttcctgcgctcctacctcgatctctttgtggtcatgaacctgagaggtgtgaaacattggcagtcacgaacgccagtgtgtggaagaggcatccctgagagagggagctggcaggcaaagagacgtggagacatggagatgggagaggggcaggctgccagttaagtccctggccccgggggaccggaaggtcaactgaacctagcttggcctgtggtttgcgtatagaagccaattaagttccttctgtgcctgagctggtttcagttgagcttcttccactggcaaagaaacttaactaaatgaaagtgatcacacctgtctccctgcttaagaacagccacggccaggcatggtggctcacgcctgtgatcccagcactttgagaggccaagatgggcagatcacctgaggtcaggggttcgagaccatcctggccaacatggtgaaatcctgtctgtactaaaaatataaaaattaactgggcgtggtggcacacgcctgtaatcccatctactcgggaggctgaggcaggagaatcgctgacctgggaggcagacattgcagtgagccgagatcatgccactgcactccagcctgggcaacagagtgagactccgtccattaaaaagcaaaacaaaagaaaaaacggccactggttcctcattacccttggatagaagctcacttcttgtcatgacacagcagcactgcaggtgcagccagcctgatctgtcactgatctccctcctgccacacccatgcccccaaccctgtgtgtctcaaatcggctggactccctgcagttcccttaagaacccaggaaggttgctggccctccaggatcaggtgaggtgagatccacccacagcttgctcctcatccccagctctaacgccccttgaatccatctaggatttcacctgggcagtctcaccagctgtgggcctttccttttctggagtcaaaacttagcttctcttatgtgtcagctcctaagaacatttgacaacatcttagaaaactgcaaagtatccaaatgtacccagaggcaaccactgttcacatcttgacacacttgttatcagaattgtttgtttttagggacagtgcctggttctgctgaccaggctggaatgcagtggctattcacaggcacaatcacagcgcactgcagccttgagctcctgggctcaagtgatcctcctgcctcagcctcccaggtaggtgggaatacaggtgcatgatgtgcctggcttatcagaatttttttttttaatccaagagaatagaagggcttttgatgaagagcagcaagttcgggatggaccctctcccaaccccaaactcttacccgagagtgtgtgatctctgctcctggaggttgtctcctagctgtaagctctcagcttgtattaggaagaatgctttcaccagaacgtaatatatcacctaaaagtggctaagcaacaagaacatttatttcaagtaatgaaaagttcaaaagtcagtggttccaggtatctgagatctgagtgaacagagaaccatgagtctcctggccttcccctcctggtcacaagatagatagctgtcagggctccaagcactatgttttcactcaacagcacctaggcagaaagaaagggggcagccaagaaacttctccaagtgcatccctctttttcttttcttttttcgagacacggtctcactctgccacccaggctggagtagaatggcatggtagtagctcactgaagcctcaacctcccaagctaaagcaatctcctcacctcagcctcttgagcagctgggaccacaggtgcatgccaccacgcctggttaacttttgtattttttgtagagatggggcttcacaatgttgcccaggctagtctcgaactcctaggctcaagcagtctgcccgcctcaacctcccaaagtgctgggactacaaggcgacagccactgtgcctggccccacatgcatctctttaattagggaggaaagtgtttccctgaaactgcctgaagatatccccttacaagtcccaagtcaaaactgggtcatgggagccctctagacagcatctgctacaccccatttctagttcataagatccactgatgtcccagtggattaggcattgggtcacttggaaactactcccctctatccctacctctcctaacacagtctttaagtacctctgttggttatctttttaagaaacctacttgccccttcattccttattctaccacatgtccacagaagctcttgcctccccactattgtccctgtcaaccttcctaccctcttcccttcactgctacctcccaacttttatatctttactttcacattgtgacagatgataatgttgacattctattctgcaaccataataaaattcaggtcaatacaaaagttgaatattaatgaaaactagaaagataacattttcattatttaagtataccatatatttcctctgggtatctatatatgtaagtttttagaaacgtctagaaaagtccacattgagcccattactgtggttacctctggagaggaggaagggaatagggtggcagtgggtggccaaaagggactccagcttcatctgcaatgttctcttttttaaaaaaggggaacgtattcatgttttgcttgtgtcattcgacttcaattttttaaaaaattactatttattttcagccaataacgtgggctccgtgtgtttggatgtgcttgcatgtttgtgcccagggaggaggaatatttactttgtgtgtgcctgtgaatgaagtagagtgattagtaagcagatgaaaaagaaatgtagcaagcaaaagcaaaacaaaaaagggggctggagaaaactaattcacaacaataataaaaagtataggaataaacccattaggaaatgggcaagttctttatggggagaacaacagtgcatgagtgaaggacatacaagataataagaataaacgtagagctctactgtattcatgaattcaaaggctcggtattgtattgatgtcaatttctccaacttgacaagctggctttacaattcatgtggaggagttagtgtgcggtactagttagctaagagagctgagaaggaagcacaacgaaacatggcatttgacttcacagataccaaaaggtgggacagcaaagaaaacagtcttgtactgaaaggaataaatggattgttgggaaaaacaggggcttcagacacacctgactcagaatatcagggagttttacttcaggtcagaggggaaaggaagaactagtcaacccctcatactgcaataattggctgcccgtttggagaaaggttagatcatatatcaatatgataatcaaaatatattccagatgcataaagaaccaaataaaaacaaaattataaaattattagaaaagaagaaataatatatttaaatcttaggagtagggaaggactaaacatggtatctgtataaaaaaggatcaaaggaaaagattgataaattggattatgtcaaaactaataacttctaacaaaagattctacaaagagttaaaggcaatgacaagctggaagaaaatatttgtcacatatctacaaaagatcaatatccagattatattacaaaactccacaagccagtgggataaagacaacctaatgcttaaaatgagaaaaaataacaggcaattcagaaaagagaaaatacaaatgctcaatatacatatgaaaatctcacaagcaaacaggaaaatacaaattttaaaaaggattcaatttttcacccatgagattggcaaatatttaaaacaaccgcctatgggtgtggggattacagccctctcataccctctggctggaagcttaaatggtacagaaatcatggaggacagtggtagtatctgctaaaactaaaactgtggacatattaagacccaacattccatttcccaatcactcccagagatatcccaccacaaaggaacatgcaatgtggtttctgcagcactgctcatgatggaggaaagaaaaagaagcaattaaatgtccatggagcttacagaagataaaatgtggtacattcatgggaatgaatacaacatagctattaaaggcaaaagcaagctatgtgtagcaataggagtatattgtaaaaatgtaacactgagtgaaaaaaacctgcagcttatagtaaaatcgctataatgtggtatgactcattgaaaatacatcaggactatgtgttactatggatggagatacataaaactgtggagggggtgggaaatgaggactccagagggtggccaaaggggactacagttatattcatattgtcctacttttaaaaaggagaatgtatgcacactttacttgtttaattaaagtataatttgaaaagattctaatttgttttcagccaattatgctgcctctgtgcgtctggctgtgctcaaatttttgtgcccagagagggagaacgtttactttgtgtgtgtctgtgaatcaagcacagtgattagtaaacaggttgaaatgggatatgaaaaaacaagggccaaacaaataagagcagagggcaacctattcacagttaacagcaaaacctataatatacctaggaatgaattcaacaagaaatatgtcagactttaaccagagaaaaccataaaactgtcctgaaagatgtaaaagatgacctgaattgagaatagagcaatgtgccgtggtaggaagactctatatgataaagatgtcagttttccttaaatttatccataaactcaggccaggtgcagtggctcatgcctgtaaacccagcactttgggaggctgaggtgagtgaatcacgaggtcaggagttcaagaccagactggccagcatggtgaaacccagtctctactaagaatacaaaaattagccaggcatggtggcgcacgcctgtagtcccagctacttgggaggctgaggcaggagaatcacttgaactggggaagtggaggttgcaataagctgagatcatgccactgcactccagcctggggaacagagcgcgactacatctaaaaaaaaaaaaaaaaaaaattatccataaactcaatgtaaccccaataaaatcccagcagaaattttcccgaaacttgaaaggcttattttaaaattcatgtggtaggactaatatgcaagaatgaccaaggtaattttgcaaaaacaacaaagagggtgagatttgtcctgccagttagcaaagcatattatcaagctcaggagcagacaaatatatcagtggaccagatttcctactgggatttagtatcggacaaaggtagcaattttaaattagtggggaaatgatatagaactccacaagtagtattgggactaaaattatttaaccattgttggggagatgagagggaactaaagttagatcctaagattcatgtatgcatatggaatttattttttgcatgtggtaaaaaaggcatacacacacacacacacacacatatatgtaaatgataaatgttagagaagaaatacaggaaaaatgcttatgacctcagtacaggaaaggctttcttaaataaaattgaaaaaaagacataaaattaaaatagatcgatttgactgtatcaaaatttaagatttctccaaagacacaatacaattaaatgacaagaatcacaatacagaaaatatttgcaatacacataaagtatacaaaatacataaagaacttctaaaaaatcaataaggaaaagacaacgtaccctaaaaaaaagaaatgggcaaaagatttggacaagtaatgcagagaaggaaatataaatggataggagacacagacttcagccatcctggtaattcagaaaaatgcaaactaaaacaagatattatttttcacccaccagattggttaaaatgtaaaacttggagatggtctggagaaatggacacacatactgctggcatgaaattaaatcagaaaggtactttgaagaacattttagcagttactattagaatttaagatgtgtagactctatgacccatcaattctgtttctaagtatctgctccagaaaaacacttgtacatgagcaaaagtggcatgtacaaggatgctgttacaggtttgtcttattgaaacaagactggaagccttttaatagtcgatcaataagcaacaactaaataaatcatagcacaatcagttctggttgccagcggccagctgaaaggggcagtggagccagctgcggcaggtgacacgcgacatgaggagagtcccgtaaggtgccctgagctcaggagcagcacctccagtgtgtacaccaccacatctatgcaagcaaacaaaagcaacaatagaacacaggacatgtttcaatgcgcataggagaacattttggatcaacagcaaatgcctaacagcagctgcctctaaagtggggaaggggcctgaggtcaggctggggaggccagtagagacttctttacctaaaatgctctaattttatttaaaggaaaatgtattcatgtattacttgtataattaaaatttaattcaaaaattctaattcattttcagccaattagctctgatttacatgtgtgctgtgttttcatttgtgtgcccagggacaaagcacatttgctgtgtgtgtgtctgtgaatgaagcatagtgattagtaaactgattaaaatttggaaagcaaaatgaaaaaagggaaagtttttccactcacaaaagcaacaaaactaataaggttttcaggaataaacctattaagaactgtgaaaaatctttatgacaaaagcaaccaacctttattaaaaggcattaaaaacaaaacaaaacaaaacaaatacaattctgattaaaaagagacagacaccatgtccacagatgggaagaacttatattctaaagatgttaatttccccttcaatgcaattcttctcaaacttccaacagacattttgttcacagaactttgacaagctgattataaaatgtacctgaaaaagtaaatgtgcaatatgaccaagacaattttaaaaaagaataaggggctgcgcacggtggctcatgcctataatcccagcaccttgggaggccgagatgggtggatcacttgaggtcaggagtttgagactagcctggccaacatggtgaaaccctatctgcaccaaaaaatacaaaaattagccgggcatggtggcgcgtgcctgtagtcccagctactcaggaggctgaggcaggagaatcacttgaacctgggaggcggaggttgcagtgagcggagactgcaccactgaaccccagcctgggcggcagagcaagactccgtctcaaaaagaaaaaaaaggaataaaggccttgggggaagggtggagtgcttatcttatcaagccataagacactttattaagctttgctcattaatatgtactattggctcagaaatagacaaatagatcaacagaaccggagtctagacagggaattgagagaaaagatggtgttggaacaataaatggtgcttagcaaactggatatctgcaaaaagagcaaattagagctctgtgtcacaccatacatgaaaacacatctcagatgggttaaagatttaaacatttcaaacaactatagacgttttagatgcaaacacacaatgtatatacactgcggtggggacctgctttcatcagcagtgcggcaggacacttaagcatccagtagggttccaggccgacctcacctcccacctttggaaagggcctgccgagcatctccatctggacctcacagactcctcttcctccttctctccagctccacctggtcctgggaagagggactgccacaccggatggactgaggtctgaagccagctcctgccacttgtgctctgtgtcaataaggcatctccctctctggcttccagttcctcctctatgagtaggtaatggggttacgctccatttcttgtggggaaatgtgaagctcgtatgagatgatcaatgtgagcatggataaatggcatggagcttacaaggatgaggggagcagatacctctactttgtcttgatccactccccataacccctgctacgcaagacttaacatccaattcttcttccttgcattgtaacttctggataattgtcgtagaatctttttggtcaaaagaagtttgagtgttgacttctgacatttgattccaaggcagaaaatactgattcggcacccaaggagcttactacctgttgctaggtgctgagaaacacacaaaataataagacataatcccagccaaaagacaggataaaactggtgctaattagaactatagtcggtacacaggtcagataaaagctcccaaaagaacatggagatcaagttactctctaaaaggtacataatttaattttgccccattcagtcaaatacacattattgccccaaactaatttatccacctccatagttgatcccagcccctttgggagctcatctcactaattgtctccatccctaatcgctcaattactcaggctccttatcctcagaatgttcatctgccagcatttctctctcttttaagattaaaagtcctggatcttgctgcttctttccttaatcgactcccacccaaactgctctggcagagattctcagaggtcccccaatggccccttggggtgctcatcagcagggccaccatgctacccaattccagaggcaccatggaggttgtgcaggtgcacactggagtagttcagggattgccctggtcctcctgacctctctgcacacacccactgctgaccaccctgtctttctgctgagacacctcccggctctttcttttcagtgctctcagaggattcttcttctcttttctaatctccaaatgttggtgctccttgggcttgatttttttgtcctcagccatcccctcgcctaaaaatgccccagaagcctgtcaacatctggatccatatttccatttgggagccccctggagccctggactggtctccataatttctcaccttgtgctctggagctgtgccttcagctgtttcttctccatctgcattgggatgtctcagcttttaccactggacttggggtctaccttacagacctggcccctttccagggctccccagctctgaaaatggcattgccatctcaccagtaaggcaaaccagaagctcaggggtcatcctgaacgctgccctcttccagcccctcttcattccatccagcaccaagactaaccagaatatgcagatcatgtccaaatcctgtccactacaacaaagcttccgaactagcctccctgtctacccatgctgctctaatgatttctccacagaacagccagagtcccaggcagattacagcaacataccagggcaggtcacatcccctgcttccctcgctctcaggatgttggcaggagctcagccctggtctccaatgctctgtatagccagaactgcttgtctctctggtctcacctctccttcctctctagtcaggccctttgctcagaatgctttccaatttgctttgtggtcaactttgttctcttctttctatcttggtttggaggatcacctcctcagggaagcctcccagagtcagatgagggcaggtcccctggtggcacacccttcagtactcagtaccattccttcagagtgcctatcagtgttggaaattgtacatttacatatgtgattatctgactatgtctttctcccctaccaccatgagaacagggattctgactattttaattcattcacccaagtatccacagtgctaggcacactgctgggctgggcacacaattaggtgctaaaagagaattatgtggaatgtatcaactttcgtattaaacaatggatgcttaacactttgggagctgagcctatacacctgctcatctttcctagcctcagcctcccagcccctacccttcacatctccaaatctcccttctggactccttagaggactcctagtgacagatccatgtcctctcacatctcaccattattccagcctaggccatcactccctcaacatgctcttattaaggccatcaaaacttactaattatgaaatccaaaggaaaaattctctatcttattggaattctctgctgcatttgacagtgttgattactttctccttgaaactcttccctaacttggttgtcatggcaaccccctctcctggttgtttgtcgcatctctcaggcccttccttttatttctccttttttgcctgcccacacctggctcctcaaatgtcactatgactcatgattctgacctgagccctctcccattttttctctacacactctccctggtaatctcacttatgcttagggtccccattactctgagtggtgacagccctgggctagtgcttccagctaaatctcttcctgagccctggacaccaggatctaagtgtctgctgggccccacttggctgtgtctgagtccactatcctgtccctcaaactggctctccatgctgtgttccccaccccaggggcctccccaccatccacccaggactccactcaagatacacgggactgggcatggtggctcatgcctgtaattgcagcactttgggaggtcaaagtgggaagattgcttgagccctggagatggagatcagcctgggcaacatggtgagaccctgtctctatgaacgaacaaacaaacaaacaaaaccaagacacatgggaattacctttggcttgaccttctctctcactctcacagataagtactcactaattatttctggtttttatctaccacaagttctgatctctctccatccccactggtctacttcaggccttcccctctcttacctggaagtctcctgcctctgaactggctacttcttctaatggatatctgggagttttggctttttagcatgccttattcctccctgaagccccttattacttttagggaaattttctatcttatgtggctgtggtgggacctgggccgttctctcacatggaagctatggaggcccctcctccaggtcctgcctcttaccacccaggtcctatcggggatggcacaaggcccaagctcagccagctaaaccaagcctctctctggactttgacttctgtccaaatagcgaagaaatagaattctttgatgtctaggcaataccaacaaatagaactgctactgagaccctgaatgtcccattcaagcctgtgacctggaccttacctatttcattgctccctggatattgtcacaaagtctttttgatacaaagaaaaatttctgaatctctatttcagacactggatttcaagcagaaaataattattctgcccctacctagctggctgcctgttgctaggtgctgaaaggtacaagaaaatgagaaagacatggccctagccacgaggcagacaaacccgtgctaattagagctggagtcagtacccagagggcagagaaaaggcctcccaaagaacatggagatcaggttacttgctaaaatgtacataatttacttttgtcccttttcaccaacactgctaatcccttcacctctacacttaatcccagagctccagggcccctctcactgccccgccctgcccttccaactgggcttgtactgcttcctccctcccatgtctcctggaagaattagctccttcctggacccactgcctgctccaactccccctccctcctttctcagccagacccagttcattccccccacaccaagaggagcttctgccccgtgccccaaagttgctgtgacaaaagtccccaaaggccaggtctaggagatgcctgagcctccactgacctctgtgcatgtggcccaccagtggccactctgtccttttggaaactgtcctctggcttctaggaaccccatgtttttggtcttctcctctggcccctccttctcagtctcctcagcaggactctcttcctgtacccattcctaaaatgtcacgaactcgtttctggccttgtccttctttgagtgcatctctggttcttcatctatccctgttgagatgctcacccttctttggtgagctcccaaccggtacaggtacatacactttcctacttgatgccagctatgcacattttccttccttgcccaccctcgccctttgctcctgcctctgactcagacaggtgggaggactctaggtgatagccttctggactgcttctatcacatctatccttaggtcatctcagtccagagccagctcagaaattgtcccctggcccaaactgttactctagcagctttccctgagaggtggccatgctgcctgctttccttgccctttcattttcctctgccccatctctcacaggaaactgttcttgatgagggtctagtggcccctaattactacatccagtgggctctcggtccctgtctagctggcctttctcttttgtctgttggctctcttttggaagtgctccacatccccaggtttccatgccaacataggctacaggtgctttttctatgtctctctgacttctttttcacctttgtgggctcccctctctctgcccaccccttaaatgggggcaaggctctttcttgttcctggacccctcttttctcagctgacacgttctgctagagccagctcaccaaagcccatggctacaatgaccatagtctcaaaccaaatctcttgtttaaatctcctgctggatctagaccctctatctagctccttgcaggccacctcctcctggatgcccacctctgactcaacctgtccaaaattgagctcaataactttctcttagcccccaaacctgctctttctcctaggtgttcttccattcacccagtcactcacgacagaaaacaggaaaggtatcctttactgtctttctttaacaccagcaaccaaccagtcagcagattctcccaatttcacctcctggatccgaccacttccttccatcctcttggcccctacccttatccctcctggaccccacctggaccaaggcaatcatctcctctctggcccacacgcctccaaatttctccaagcaaccagagtaatcacctcaaaagagaaatcctaccatggcacctgcttgcacaaaatgcttcaggggctccctgctgcaattgaagacccaagtcttaaattagacatagtaacactatgtgatctggttctgctttctccacccctagcctctcatttcatgcttcagcaatccccagctgtctgagttcatccatgatggctctcacctctgcctctgccttctacttgagtaactcctacccatccagtcacctcttctaggaacctccttggatattcccatgaaatttcacacctgcaccaccaaccccagctgcccatgcttccatgtcccaggcacctctctggccttctccttcctatgtatcattttagtgtctgtctgtgtgtttttcttaactctttgaactcccaagggcaaggatcatatttatcttcaggtgtgtgtgtgtgtgtgtgtgtgtgtgtgtgtgtgtgtgtgtacttttatagatacaggatcatgctatgttgcttaggctggtcttgaacttctaagctcaagcaatcctcctgccttggcctcctaaactgctgagattacaagcattagccactgtgcctggccaatatttaaaaacctatcatcatgcctgacgcaaagtagatactcaataaatgttgagtaaagttacaggccacttactctctctgaaaacttctctcttcttccgactttccaagaagtgtacaccaattcacattccccccagtagtgtgaaacagtgcctattccactatcctcatgaacattgggtattcttaaatttcttcccctaatttgttagggaaaatttgtatttccttgttgtttttattgttgatctttggttattagtgaagttgaatgttttttcaaaaagtttttcagtcaattccatttcttttcctgtaaactcaattcaggtgacttacacacacttacctgttttgcttttactattaaagttttgggtgtgttcttttatacattaagaatctgcaaccactctgctttttggttgtttgtgatattacttgactttgaaaatatttagttttaatgtagtcaaattggttggcctttgccttcttgatgtcattttgctgctttttagcttaaatgggctccctcattcagtcacttgttaaatattccttttccctctggtttttaatgggctcatttttccttttgacctttgaaaataatttttgaatttgggtgtgtgctctgaggtgaagttggaatggactttttctctttttagtgaatcaacagttcatgcctcaattttgggtaaccctttccttcttggctctggctctgagcttagctattcccggctgattacagcatttatggtcccagccttctcagagcacataccacctgaacaggaactggaaggctacaggaaggtatgattccaggcacagtgacagtgaaacacagggaggtgtttaagggatgggagcagaaagcctttctggaagcctgacagaagagtgtgtggaaagatggatcacctactttgccaatgtgaatggctaaatctagctggcatccacctgtcctagaggcttccaattctgcaaggaaacattattcggggtcacaagagacaaaatgcccaccccactcctcacctacaccaacctacctgtatagactctgccagcacatttcaccatcagcagaaaaatcatctcagccagctcctgccaagttcaccttctgggggctgcagccatcatcacgattcctccatgctgcaagatgagttcttgacccagaacctggggtccccatcctccttgttcaattactgctctaggcaccagggtatctgagggtaatgctagagctggaagggaactgtggaattatctaatccaactacctcatttcacagacggggaaaccaaggcccagtgaggggaggtgacccacagccatccagcaagtgagtggaaagcatccttgctgggaaaactcagtgtgaggactttgcccgtcgaatcttgaccacaaaaatatgtggaccctgggttctaaaataattacatggtaaacttgtatattgttcaggaaagtggcatggtgcgtaaagaagacagtgaagtcagaggagtacaggcctatttttgccagttctttctggaagaactgaagtttgttctctcctctaaaaaatagggataatcaagaatccaagatgatagaagcaaactcacccaacagactgagggtaagtctacatagggtcctcaaacctcaagaccctaaatgggtaataccatgagtatgtgaggcccgcccccaccgaaaaaaaaaaaagaaagaaaaaaaaaacccttgtaaactgtacagaactgtgcccataggagaggttggtcatcctagtactggccaccatgtaggtgtcaattctcaatactccaggcagcccaacttaactagccaagggtggttcctggccttcctctatcatcttttttttttttttttttttttgagacagggtctcgctctgccactgaggctggagtgcagcagcatgatctcggctcactgcagctccgcctcccgggtttaagcgattcgtatgcctcagtcacccgagtagctggggttacaggtgcatgccaccatgcccagctaattttttgtatttttagtagagatggggttttgccatgttggccaggctagtctcgaactcctggcctcaggtgatccacccgccttggcctcccaaagtgctgggattataggcgtgagccacggcacctggacacttcttgtatcatcaatagcttaatgctggtatttttcctctttgatctaatttcccatttcagttatttcaccccagcaaatatttattgagtacctcccagtgatggcttgagaacagatgaggtcacctgccgagtgctaagcctcccaggtttgggtgggtgggtcgttgcatgcttgctatccaaggctaagcccctatctgtccatctagtgccgtccactccaggccacttgggacacaggccatcacttatccctgttcgctgttggcctttctcttcttggtgtcatttccttgcttttcagcttagagaggtcctccactcagatacttaaagattttattaaacattttattcctttcctcctggtttttaatgggctcatatctatttggctattaaaaatagcctctctcttccctggcctcttccccctctgaaaaatgatgtgtcccagacttccagtcctatctgagcaccgggagcctccctggtgcctttgccccagctccctaactgcaggcagccctccacctccttcttcccctcatgactacagggaagacaaggacagtggtgaaagtgaggctctgaagggcaacagaatgggacacaaatcccagctctgccccccatcttgggaaagtgccttcatcttttgaagctcttctgtatagtgggcaaaaccacgtcaaccctaggatgttctcttaaggtttcagggagatattgttgacaaaatgctcatcagggcctgatccagaaaagcacaggccaaatattagctacataaaaaaagaccagtccaaacgggtcacttccactcatccacctctttcccttcatagttggaagaggtgacctgttcctctcatctccacttcttcctcttattctcttctcttcccatggtgatgtgatgtctgtctctattgctctgccaaccccaagatggatgacaagacctcctaactgaccaacccaactgcctcttcttggttgtcttgctggtactgctcaccactggaggcttcatattccttctcaaaacccctccctccacaccttctccctgggcaatctcctggaatctcaagtgaaaggggccatctcttccgggaggacaggtgggctcctctggctgggcacctgcagaagcagagcaggaacacctaggggtagggaaccaggctgtgaaatgctctgctccattaacagagagaatgccatcctctaggcaatagggaaggacgaagttaagccaagagccacagaacatgacctaagctggtaaagatggccaatggtggccatttggttgatgggttgaaagagacaagattgaaagcagagagacatctggtgcaactgttcagcaagagatgatctgaattaaaagaaggagatggatataggaaagatcaagggaccggagagacaggactagaggtgcagtggtgtcatcacgaccagggatcgggaggcccaatccaatcttgctggttttggacatcactcatactgcacacccagactgttaggagggcacagctgccagggctattagtcacagtagctgtggtgtgtgctatgtgcctgtggtccccagttcctgtcagtacaaaatggaaccatatggcgttcataaaaatggctctgagggtggaaagaagaactggatcctatttggccagtaagtaaaaacaaacaaaaccaaaagccaaccaccaaaaagcagccccccaaatggcccaccccatctgtgaatagtagtctaacccccacagtattgtagctggagtctgggggttggactgaggacagtttttccctggaatggtctgagggaataggatgaaaggacttaaatcccggtgatgggctcatatgggtgtgtgtggcagtggggcccggctgcagggagttctcagactgtctaaagaggacactcatgatctaggaggggaagaggagatggaaatgggaaaatgagcaaggcagaggaccatctaagatgtgatcagagttcaggaatcaagggccagcctggcctagctgtgaactcttgggcaagtcaagaaacctctcagcagagcttcggtcaactctctgtgaaacagtagttcacgatctgcactcctgcaagctcacctgcctgccagcctatggggaggaattcataaaagcgggaaagctggggaagtcccatatgcagggttagggggtgggaaaggtagagggagggaagaagagggaatccccttggcttacaagtgacccaggagtccacctacatccagaccttacagggtgtctaccacctggtggggctactcctaaaccacatgtgagctgctgccacagcgaggatgccaggctgggcagtcttttataaggttcttctcgcatatctttgttcacaatactagtctggaggctggaaaataatctctgtcacttcagagttgccaagagatttgggaggcaaacagagttcctttccttctaggaaagactgggccacccaattacttagggactcttagcaattgattgaaccacctattcatctagccaccaggtcagccaaccagcaggtactatgccaggcctggtcaggtaaattctgtgcttggtcaaggaacaaagactaagccccttatcttcaagggttgtgcagggccttgatgaccaagccaagggattgggcccataaacaatatggaattactgaagggctttgtctgtctttcctgcctcatagacacttccatgtcttctttggctctaagctaagatccttgacagttctgcacccaagagacttcaagtttattttttaatgcaaaagatcctttgattaaacacttgattgtcttaatatactttctttcaaccactgtctctaagactaaaataacaaggagataaatgtcactgatgtttcacagaagacagctttggaaatgttaaagatatcttggtccagccccctccttgacttataaatggggaaacagaggcctagagaacagtaaggagagcaaagccacatggaaaatggatgggaatcagtcccagggccttagcacctgcctgcctgccccctccttggagggtcaccactaccagtgtggggcaggaggctggcagagggtttggctttggaaaaggtgttgagctgtccaagtacaggctccacacaagctgctcaggaaaagtactgagaggccagaaccacccagaagattagtctttgaagaagactcatatctgaccctttgggatatttgacaaagcactctcaaacatatgcttcctctggttcctcgttgggaggaggctggacagacaggggttactctccaagagagggaaatccatggagggttgctgggtaaaatggtggctaagtaggggctcaaactgaggactttggtctcccagaaagaaagctacaccttggtgttttccttttcaggatactgcctttgcagagaaggtaaaaaataattaatggacttcacacagaggtactgagatatggtctcccaaataatctctacctaactccactaaagccctaataacatggtattatctacccacaagaatgactctgccctccctcctgctgatctgagctcctcaaggagggcacagtcattctgcaccagcttctcagagcttggaaaagagcctggcaaatgctcctcaaatgaatgaatgagagggagagctgggggatcagatcacatccctaacaggctggagcttagtaaaggccagtggcagggagccataaaacagaggaaataacatttacggagactgtgccttggggccgatgctgtagtggtggtgtgttctctatgagacaggtgaggtatagtcacaaaggcagggcgtaagcgctgggactctctcaagccttgcatcaaggttcttcagtccttaaagtctatctctgcccagcctctgagtcccttttccaggatcccaaagggagacccaaggcttctgtctgaagccttcagttgctgcttaggcaggttctcttcttcacctcaagcctgcctaacaatagaagtttttctcaacatacttcattctccccttgaagcctggcagatcaaactgtgttcttcctgggactttcaggaagatactggggagggagggttgctgggctgagacaggccaagctccctaggcaggaccatcttccatcagggagagcacttcttcagtcattcctcttttcagaacagtggccctttcacacattttggtgcgttggggagtgaactttgcattggatggtagaagacagggttctggctctgcccaccaaatggacacaggtgacagcccttctctggcctcctttcctgcagctattcaataggagttggctttccttctatcatctttcactgcttccttctccccagcctaccttttctcctgtgtccctgcctcacccacactcactccttatgtctacttctccccattcccagtcatctagagaagccagtagccttctccatggccctgctactgtcaccactcaaatgctgtcctgtttcttgccgacagaatcccatctcaaaggctgttctgactgggttactccccaactcccatcagatcctcgtttgtgatggttcccagttggatggaaatgaagagttcttagggctgagtttaggggcctgccaatagcatttcagctttagatttccttagtatctcccaacaatttgctagctttagatagactgacctctttatcccaaaaagcctttttgggttctgattctagggcagccagatagtggtggtccttcattttactttcatcccagtctctttatctgtaagcagagatgcttgattagatggtaaaataataataacatctcattcattacttcactgctcaaacctttatatttgttcttcaggtctccacctgaaagtcaatccttccaggcctacattgggtcccctcttagaccttctcttctagcagctgacacagtccacggttgtgtatcgctggcattatctgctcaatgttgtgccctttcccattagcctggagggctccctaatggcaggaactgtccaccctgtagtctcaaggcctattcctgcatgggattctgccaaataccagccaaatgactgacaatgcaggcccccttgggagacaagaggagcccatgaactcagtcgctacagaaggggaagtctgcgtaacactagcagtagcactcaacagaaggctgagtgaaacgctccagtcaagtagatccccagggagaagaaatccagggaagcttcctgacagaggaaatacctgggctcacatggtacactgactaaagcataaagcccatgccatcctgaaagtgcactgccacctactcagagcccagctaacatcctcaaatgggtccaggaagaccctagatcttgggagaaagaactcccaggatattaggactagaaaaactgtctgctccaaagaccacattttacctctctggaaactggggcccacagcagggtaagaaccagttcctaaagaagcccagacctaggccttatggtgtcttgtggtcactaggtaccatgtgggcaaccgtttcacactgagccacagtgaccaatgtaattgtgtgtttttctaaggcctgctgcccctactcttttccagaaaaggtatctacttttcattttcctaaaaggcagttcaggaagagggggtggttgcctggcaaggtaggaagcactgtggggtgacagaatgctgatttggcagtcactttgggaaggggtgggctgcaggctccctgctggaaagggccacaaatctttcagagggaggcctgtttgtgactcttaagcgggcttgacctaaaacagaaagctgctttccgagggagagcaaaataagcaataatcttggcttcatttatcatccaggtgtcgccacaggagagtagggacacaaaagccttttttttgtttgttttgtttttggaatttgcaattgtctattttgttaagtcttcccactaggctacaatcatgagctcctgaagagtcaggtctgagtcttgcccctgaaatccccagcaagcctagtacagggtctcaatgtttgttgaacaaaccatcctttccaggtatgactcctcagcttgtcaagactttgcagaaccacgaaatctatccagaaacacagaaaagaagaattcagagataaaagcataaaagaatcaggtaagaaaattacccagcagatatgatcgataaaagtttggttctttgaaaatacctctaaaatagacaaatctttggcaagttttgaatgaaaaaaggaataaagtgacaatggggagacttaagtgaacaggagaaaaccatactcaattttatagcaacaaatttaaagcctaggtagaacaggtgatcttctatgaaattaccaaagcccttcacgactgtgactcaataaaacctcacgacagccctgtgccttggacaggcagtattcctaccatgctttctagaagaaggagattcagaggtgaatactcagcacaggacctgacaaactagcctacactgtctcaaaggtcatggccatgggagcacgtgcatacctacaacatggaaccacaccactctcggcacttccagccatcaccttacatccggctggttggacagccagtcttatttatttttccacttgaaatgccataaggggtttcactatttttacttcaaaagcagcaccataaaaatccttgatgattagagctccagctgtcttaagttgtttgtcaagggatcggttactcaaatctcctatggagggaaacaatttcaggcaagaagccatgggagctgagaaacgcaaatgtctcatctctgaaaactttcagactccctcctgttcaccgcctgtcctgccccctgctccccctcccccatccccaccatctgctctccagaaagcagatcaaattttcaggctaaggtactctggcgccaaagactcagcccctccatgcttccccctgccccccaccaactccgaaatccaacaccacgacccaaatggactgcagccacataaaaccacaaagtaaagtttataaagctttattaaacatttcaaacagctgtgcaacgaacacaccaaataaaagctctagaatagcagtccagacgtttcacaagtatggcctcacagtcccattccctagatggactgcctccagttctgttctctgcctggcccatctctctttcccctcaggcaagagagagatggatggatcagactgaaaggacaggcatgctgatctccagcaggcaggggccaggagaaagtctcgtttgccaacacttgttactgaagcgcagaaaaagcagcaagtgacagtcacaaagtcttcctgggtattcttcataatgtacagtctatatgcgcaggaacgaagaagctcctggcgggaggatgatggccactgctcccctctgtcttgtctgaaccacctcggagtccagtgtgctggtcactctgcaatccccatgctaaataaaaactgtagcggcacctaccatatatagctagctattgctaaacctcaaaatcagaccacgttcgataaagcttctttaaaaggaatatacacatgtatttgtacacacacacacacagggcacaccaaaaaatatccaaacatctatcaaggggatcaaggccgttacgaaacacacaggtactctcccactcactcagctggggactgctagaactacgtgaacacaccatacttcaatgctgcagagcatgcacgggagacacaatgaggccccctccttgggacagttgagaaaggcaggaggaagggcaaaggaagtgaggctgggcgggaaagcttgagcccagacacccaggtgaaagagcaacatctatctgttgcttcctttcttaaaaatgaagtggagaaaatactgaagatttgtggacaactaacagtcaagacatgtttctgtctagcctgctgaacaaggaaagaaggatgaaaaagcgaggctctcgggcgtcagcaatctcttcaaattcgagataagtgcaaaaatgagccctgtcttggacaggtactccccaaaaaaggaaaagggtagaagagaaataaagggaaaccagaagagggactgaggagtcagtaacattctgggaaggaaggagaccctgacaaggaggggtcacagaggtgacaatgagactggcattttatctgccccaggtcacattggggcagctgaccaggatggacccagactcctcacagtaatgaggcgagaggggtggtcatgcggccagccaggacctagatggggacagaacacacacaaccacaagaccacccacgactataggactttacaataaaagcaccggtcagtgccattattcacattgtaaggataaaacatcacaggccaaaaaggcgccgtcaggaatgtgacacccgcgaggctgcgggatttgaaactccaatgctttatgacctatgtcaatgcctcccctcccgtcttctgcttccttggaaagctaacagggcaggccgttaggtgcccacaacgccgggatcatgcgccgattctggaagcggggaatcggagcagtggtacaggaaacagtttccccagcagctatagcagataaggaacagggctgccaggaaaaccaaggcacaaattgtgcaaggcttccgttccaggaggaagctgagcaggtagaagcccatgaacatggagtggctgaaccacagggcggggttgaggggcttggggatgaggaggacgggcagcagccactggaggcaatacatgatctctgccgggcagggccttcaccaaggctgccgggcaccgctgcaggaaccgacctaatgggagccagcgggcgcaggcggctgccctccgctttcttcaaccctcactctccaggagctgagccgctgtgctctctggctgtcagcccgggatcaccaaggcagcagggatcctgaagagaaaagtcaacacaacagacaaacagacaaagaacagacagacagacaaaaaaaaaaaaaaaaaaagaaaaaaaaaaaaaaaacaggaacagaatgtatacttatttgggaaaatggatcatggttaacaacagcaaatgtgaaatgccctttcctccctgcccacccgtgaaagttctactcctctccaagtcactaattcgggaagcttcctgggatgtctccccggggcttctcctgggggatcggggagagggctctttggcacggtttcacacagtgggctggctttgcctgggccctgcccagcagagatcatgtatcgcctcctggggctgcagcccgtcctcaaggggcccagacctcacaataccgcccagtggttgccaaaggacgaccaagggctccctgctgtgcccccacgtggtaaggacagggttctgtatctagcatctctcacagccataggtgctcaggcactaagtgcagagttaaagctgttagcggggcactgccggccaccagaccacaggcaaaggatcctgaggcagctacagcctcgaaatattttaagatggcagcctaggctaagcttgcctttttcaaacagcccagcgtcactttgccagaatctgccaacttctccgaaagtcaatgtagaaaaaaagtcactatgctactttgtccaaactgaactcgtttggatcattacacctccatctgctgctggcactgtatagaacctgacctctgggagcttttaatgaaaattaattttctatccacataggggcaaatgccagttggtccctgggccaggcagcttgctggaaagaggtgctttcggctggctaccggtgcgcggggaccacactcacaaaccgcattccggtcttcccgcccgaaaatccgcgctgtgcgagggacccacaagactggcggtctaaaagggacccgcctcacttggaaacggggctgcggtagccacaaccctccggtagcggtagcgtaaccccgttcggtgatccagccgcacagcgcaacgggtacaaagaaccccactggctaaggccgacctaccagggcttgggggaggggagcggaagactgaggtcgaaacgacctgtccagcagaaaactatccccaagcatattccaaccacttctccgtagagctcattccttccgtgcatacgaagggcgccaatccttcctgtatccctcctacagataccgggtgactactgcttttgcgcccaaagcgcagtgctctggctcagctccctacagtagcgacctccaccgcagattctcatctcctcgctaccgtaagagagatgtaaagaatcagacgggttacgcgctcaggcaccctcatgaagcagaggacctgggcttaaaactcattcagtatcaggaaaagagcgccgagcacgggcctattatgccaaagcttctgaaaggggcaccacgttttttgctctatggggcagatgacccctccctaatttcggttttccatccatccccaaggtaggctttggagtggcaccggagactgagctcaaatttgcaggccagggactggggagaagggcgccacactaagagacctgcacccccattctcgccctgtactctacccagagtcgtggtacccctccattttaaagcaaaatccaaaagcaagcacggcggaatcttctggaagggggctaagatggaactcaggaggcgggggtcggtatggaaagagcagatggattatttttttcctctcctggcgaatgaggagcgcccccagccacccctcctcataaacaccccccaaggcgcgcatgcgcacttaggtggcgggcgggtacttaaggcgcggccaccgcggctgcggcagtgcgcccaacagcggactccgagaccagcggatctcggcaaaccctctttctcgaccacccacctaccattcttggaaccatggcggcagtggcggcggcctcggctgaactgctcatcatcggctggtacatcttccgcgtgctgctgcaggtaagtctgacggggtttcgggtgggagagggttcccaactcgcgcccctagaacccgcaagactgcgtcgcgattgccgcttcccggacccgtcctattccgattgccgcgatccttgcctgcccaagtgccgctgccggcaccgcgcgccccctgcccattccctgcgccgtcctcctcgcgctgaccctccctagtgcgcccgcgcctgccagggaacaaagactcggggcgcggcgggcgaccgctgcggacgatcacccaggcatttagcgacctacgcggtaagaaaaacccgctacacccggactcgaccccaggagggaggcggggcactactgtgttgaaagactttacagctcgcagagtgaaaattttccaccttaaaaaattgcgcattgcggagaaattttatttaaaaaaacatatagcgcttgcgggggtggaacaaaaaataagttagaaaaaggcacttctcagaaaaaataaaaattacttcgcaaaaaaaaaaaaccctacaacgaattagagaaaaagtagttcacaggaaaacagaaaaacgcgcattgcaggaaaaataaatcggagaaaagcacttggcagaaaaaaatgcattagattaaaaacgcactgcagaaaaaaattagacaagggagctaacggaaaaaaatggatcgggcaaaaacgctttaaagaaaaaaattagaggaaaaagcccctcgagagaaaaatagaaggggaaaaaaagcacttccaaaaaaggacaattgctttacaaaaaaaaaaataataataaaaaaaataaaaaagaggcaaaagcgcttggtgtaaaaagagataaatcagaagaaagcgctttgcccataaaatcatttaccctaaaagctccctttgcaggaagaattccctgctaaaggaatcctttgccaaaggaatcgcatatttccttcaaggtgttcctggaatgctgcatttactgggtaggattcgcttttcgaaatcctccagggacacagcccattgcgagaagtgaggtatacctaagttgtgggtccaatcagcttgccgccatgcagctctcagcacagttggaaaagctccagctgccctgactcgtggacaagctgcgcccgcgcccgcctctccagcctacgctggatgggcgggcggggcagggggtggggcgggggtgggcacggcagcaccacagacatgctgtgggtgctctccactaagggtgggtcctgggtttctcgtcgcaggtgttcaggtactccctgcagaagctggcatacacggtgtcgcggaccgggcggcaggtgttgggggagcgcaggcagcgagcccccaactgaggccccagctcccagccctgggcggccgtatcatcaggtgctcctgtgcatctcggccagcacgggagccagtgccgcgcaggaatgtggggtcccctgtgttccctcgccagaggagcacttggcaaggtcagtgaggggccagtagacccccggagaagcagtaccgacaatgacgaagataccagatcccttcccaacccctttgcaccggtcccactaaggggcagggtcgagagaggaggggggatagggggagcagacccctgagatctgggcataggcaccgcattctgatctggacaaagtcgggacagcaccatcccagccccgaagccagggccatgccagcaggccccaccatggaaatcaaaacaccgcaccagccagcagaatggacattctgacatcgccagccgacgccctgaatcttggtgcagcaccaaccgcgtgcctgtgtggcgggactggagggcacagttgaggaaggagggtggttaagaaatacagtggggccctctcgctgtcccttgcccagggcacttgcattccagcctcgctgcatttgctctctcgattcccctttcctcctcactgcctcccaagcccaccctactccaaaataatgtgtcacttgatttggaactattcaagcagtaaaagtaaatgaatcccacctttactaaaacactttctctgaaccccccttgcccctcactgatcttgcttttccctggtctcatgcagttgtggtcaatattgtggtaatcgctaattgtactgattgtttaagtgtgcattagttgtgtctccccagctagattgtaagctcctggaggacagggaccacctctacaaaaaataaaaaaagtacctcccctgtctcgcacagtgtcccaggaccctgcggtgcagtagaggcgcaccaaaactttgtctcttgtgatttctttagcggcatcaacatacacttctaagactcagctgatgtgcccactgtggaacaggcacactgcttgggggagggaggaaaaggagggccatcaaaattgcaataagctgggcccctcacacacccaaccccatctcaatgctgtcctgtgataaaggaccatctccccctctccccaaagagaaaggctgacatcttcacttgtggtcctggaataagggaccacttccccctccccaaagggataggtgctttacttgtggtcttaggataaggggccaaagcaagtatcactttgggaaagatgagaggaggggaaaaaggtgggagtagccctccaaagaggtactagggaccaagggggtgatttcagaacacaaagccttacttcaggtctccatccaggagccccaaagaaatgagtagtgggcagggtggacagtggcttagacaatgagtatgggataagaggtgcagcgtggcgccttcttcacccagcttaatgctgcaggccccacatccaccaggaccactacaaagacaatctgcctggccttgctactctgcagggtctcctggccccacctcaccccagaaacctctctccccaatactgggtttctgcttttcccagcaccagcctccgtattcttaggaatgcttaccaggtccgtggccctgggctctcccctgccatcacgtcagggtgggcagtgctcggcctcggacttgtcttcctctcccactccccagtgagtcagggctctttctacacggggtcagctgactgtctcaccaaatggccctgccgcctgttcagccttgtctctggctttatgtgtccctgtcactacacacctgttgctgggtcaacaccaagggagggagttggagggccataaatctctcttcctgccacttcttcgaatcccttagtcacagctgtcacaaatacttctgaagcacaaagtaccttgcccccttaagcctgatcatgtttccctcccctaagcaagcccttaagtttcttagcccaatcaccagcacctctaaaggcatctaaaacttcattcggtatcagagaattataggggtggggaggtgcagatcccggttctggtcttgactttgccatcaatcagcctagggaacctggacatgtcaccttgtacccttcatctccagtttccctctcgaagagggcctttgagatgccagtgaaccctaacacgctagaaactgccatagcagtggcaatcaggactcatcaggacttgaagaggatgtgcaatctgagacttcatctttcttaggctgggtggctatagctgctaccatagcctgaaggtgaggcaggtctcctctcgccccagtgtgactcatcagcaggcaatgcccacacctcctcccttctgaaccccatatcttggcaggcctcaaaactgggagtttctgtggttttccacactaaacccacagaatcatgaacataccaacatgtgttctccatgaaggctgaccctcccttcggagcttttgaggggtatgcccatagccccactgcccttcttgatgctctaacctcagcccaagtgacaaggtagcagatttcagggaggtaggccaaagcagcatggtaagagctggctgctctggacacagcacctcttgtgcccccacttagaggacaagaggctcctggtagccccagagctttccatatcatcttggcaaagcccttttcctccatccgtccatcagcagggctgtgagtgtggcaaggtgagatgacagatttccaggcaagggctgccctggtggcctgcacctgcacgtgtgggcttcaatgtgcaatgtccactccccatttgcatcctccacccacaaaacttcatgttctggcagcaaacttaacccaccagagaagacagtgcattcactttccatccagtgcaatgccatgcaatgcctagatggtccaaacacaccttgtttataaaattttttccacaaactataccattaaacattttattctgatagagagcaatgcgaagaattgaaaatgactagtgttttactgcacagcccttagtcacagtgctgaacgtcccctttgcctaaaccatcattgctcccagaagactttgcccccacaaggccaaggacagagcagatcggttgggaaggaattgggaatagctctgtgggactccagcaacaggtgagagacccttgagactaatactccaggatgttagtttcttagcctaacgaactgaagttaagtccagaggtgtttaggtaccatgacttttaggggtgcagggtgctatgtgacactgttacctttatctgtggaatatttgaattgtcactgaaggaagggatgtctgctgtcagggaagggcaggggcaagttccttgagcttgggcaacggattactgttggatcggggagcaggtttgctgtgagccatttactagatatctattttgaaatgtgtatctcctcaggagccaacaccccaaagggagattctgaatttgcagttaacttcccccccccaccgcccccaccccccctcagagatttaaacgtgtgcactcatgcacatacacaaaacactagtcaaacaacaatctcttttccccccggtaacctctgacttcctctatatgccccagagacacgttgtcaccatcttccctgggagtgatcctgtttatcctcccctccccgacttgccctcccacagggcccatgcatgccccagcaggatccagattcctgagcatttccagagcaggaagtcagagaggcaggcaacgcgtggttcttggtatatcgcacagggacaggcttgaaatggaatgcatgtgtttcaaagataggagaacaacaacaaaaaaagacagtctaacccagattcctctttgaaacaacatattacagattaaaggttaaactgtttttggcagcaactctaacaagactaatttcagatatggaattgacctggtcactggaaaccgaccaggcttcccgtgatcaaatcttttaacagatttgcttgacattaattagtctctgatttaaaacaaacaagcaaacaagatctaacacttggcattagcacttaagctggaacttttttttggtcccagctttggtgttgccgtccagaaggctgacgggatgactggaccatgtcaggcagggcagagaagccgtccccaacacaccagttccctgaaagggatagacgatccaaacctataaacagaaaggctgtttctttccgaggacagaccccagtctcccaacattcggcgatgaaatgggacacggaggcctggaaggaaactaaaggagatttggaaaggggaaggaaaaaacaactgtcccccatcccccatgcttcctttccaggccattagtgcgccaggcattccgttccttcagctgcccttgagggccactccccacgtctatagaaggaaagggaagggatgtccacccttgatgtaaagttggagggagtaagaagcgcccgcgactcttagcagagcgtcagcctatcaccccagacaccgaagcggagcctcaggagaccctctctcccctcacccccacgtccccccacctcccccccaaaaaagcaactaaagcaacgcaactaaactgatggggacagaatgacaggcctctcacaagctgggcaccctgccgtggaacccggggctgcagagatggtggtcgcgctcccagccccgtgcccccggctctgcctgtctcatcctgcaagggcgctgaccttggacaaggccagagccagcacccaggagtactatgacccacctccgggctgggaagggaccccccaaggcccaggctaggtccaatcacggcaatcacctgaagccggacaggggcgccctgccttcccggggtatgcggaaggaaaaccccagtgacggggacccggcgacgcctaaggtgacccagaagggacaatatggcggcgcggccgcatggagggcctctcatcccgccccaagcaggttgacgccacggtacctgcaagccctgccatggcgccgccgccactgtcgccgtctgccgcagcctgcctccacctcagctcgccaccgacgccgcaggaagccggggagacgcccccttagtcttctagtcgagccggccgaggacccatcctgggatcgggctgtctaccgcaaacgcctgatcacaaggtccgaagtgggggctcatcctcgccccatttcccgtaaatatcagccacagaccacctttgaggactttgtatgcacttttacaaaactctgggagccccgagatcttcaagcccgaataatttttatcaggcgcagtgtggacagccccgaagcgcggccgggtcccctcatgcatatgcagcagattgtgatccttactccgtgagcgctgggcgggccgggttgtgttcatgttggtgaacccgcttcgttcttgcccgcgtggatggtccgtggactccgggaaaaccttctcgtggctcaaagtccaccccctccctagcgtttcatcatgcagccaaggctcaggagctgaaaggtccgggctcagaacttgggactgccttgggtcaggcctcggctcccccacttgccccgtaccttgggccagcgagcccctcgcccaccccgacccggcttctgttgaaatgcccaccttagggcttttatgaggcttgaatgagtccgtgtagtcatttattagctaattaagcatattccttgggcgcttactgtacccaagcgcagtgctaagggcaggtagagtcggtaacctgggtctgtccctgacctcaaggcactgccagtctaatggcgggtaggcggggagacagtcatataatcactgtatattagtgactttaatcaatacataattacacatcatgggaagtgctgtgagaagaagtagagagtgttaggagaaattaatggagtactaatgtagggaaagggtggaacctccttgggaagatggcatttaggttgagaaacaaaggacgattagggtaagagtgagaggggaaatgttctaggcagaaagaacatttgtcccagatctggagctgggaagcggcagagttggggtgaggtgagcacagaagaaaacaggtcagctacatactgaatttggcttttctcttgagagtcagggaagccattttcatcaggaagaggatagcaaattaggatttctgaaaggccacccaggccgcatggcttggaaagcactcaggagtgggtgtaggcagaccagttaggaggtggttgcagctttccagacaaaagccaatgctgactcagacagggtggtagcttggggaggtgaagggaagggtggaagattggacttgggtggatgtggaggcattggcaataactcctcgctaggttttagccttgagtaaatgaaagggtaaaagattccttgaccaagacaataaagcctgaaagaggaacggactgagggggaagatcaagttcggctttgagaagttaagtttgaaatgtcggggcaacatgcaggcagagagggtgagtaggcaggtttatgtgacacagaagctgcgaacggaggctggggcaggagatacatatttgggggccatcaatacaaaggtcatggtgctgggtgagaacgcaagtgaaagaaggtggagagaaaagaagaggaggatccgggaaaggagactaagaagcagtggccagtggggtagaaagaggaccaagtgagtgtgggtcctagagaggaggtttcaggaaggagggagtgctcagtggggctgatgctgttgagaacagaaatggagccgttggggtttgggaataaagaaggttggtggactgtatcttttatgttgcaagttaaacacacaactacatcaagtggcttaaaaaaataagtagcctgccactcagtggctaggcagtgtcatcaaggactgaggttcattttatcttctgtccttgtgctggtttatgctcatggccacaagatggctatccagttcctgaggtcacatccaaagcaaggagatgtccatttctcctccagctgagactcaaaacaggcctgaatgtggcctcccaccatcctgctgcttacaggctaaaggatcaatgcatccatggcagccacacccagtatccaacactgaatgacaagaggagtcttgtagtggaagctcttgtttagaaaaagagagagctggctttgcagatgccgctgggatccccatactatcagccatggtcagccccaccttgttctttgacatcactgtcgatgacgcgcccttaggcccctactccttcgagctgtttgcagacaagattccaaagacagcagaaaactttcgtgctgtgagcactggagagaaaggatttggttaaaaggtttcctgctttcacagaattattccaggatttatatgtcagggtggtgacttcacatgccataatggcactggtggcaagtccatctgtggggagaaatctgatgatgagaacttcatcctaaagcatacaggtcctggcatcttgtccgtggtaaatgctggacccaacacaaacggttcccagtttgtcatctgcactgccaagactgagtggttggatggcaagcatgtagtctttggcaaggtgaaagaagaaagaaggcatgaagatcgtggaggccatggagcgctttgggtccaggaatggcaagaccagcaagaagatcaccattgctgactgtagacaactccaataagtttgacttgtgttttatcttcaccaccagaccattccttctgtagctcaggagagcacccttccaccccatttgctcccagtatcctagaatctttgtgctctcgctgcagttccctttgggtttcatgttttccttgttcccttccatgcccaggtggattgcagagtttatgattatgaaataaaaactaacaaaaaaagaaaaagagagctgaatgttgagaggctgtggagcaacaaattcttgcagtgctgacggcagagcaaattggtacagccactttggaaaaccagcatctacaaaatctaaacatacacctatgctgtgatctagaatttccactcctaggtatgtacccgagagaaatgagtgcctatgtttacatggagacttgtgcaagaatgttcatagcagacttattcatagctcaaattggaaatagttcaatgtccatcactggagaatggataaattgtggcatgttcatgcaatggaatactgtgttttacatataaaagaacaaactactgttacatgtaatagcaccagttaatctcacatatagtatgtggactaaaagaagccagatacaaaacagtacataccatatgaatccattcatataaagctcaactaatctatagggttagaaatcaaaatggtagttacctgggtcaggtcaggagtagggatgggaaaggagcaagaggagcttttctgggatgctggaaggattatatcttcttctggctggtgattatgtaagtgaaaattcatcaagtaaaaattcaccataagactaggggacttcgggaggcagaggctgcagtgagccaagatcgtgccactgctctccagtctgggcgacagaatgagaccctgtttcgggggaaaaagaaagaaagaaagaaaaaagactgggggctttatatactttacgtatgttatacctcaagaaaaatagaagaaaggggctgggtgtggtggctcacgcctgtaatcccaacactttgggaggccaaggcaggtggatcatgagatcgggaatttgagaccagcctggccaacatggtgaaaccctgtctctactaaaaatataaaaattagctgggtgtggtggcacgcgcctgtaatcccagctacccgggaggctgaggcaggagaatcacttgaacctgggaggtggaggttgcagtgagccaagatggcaccactgcactccagcctgggcgacagagcgagattccatctcaaaaacagaaacaagaaaaatggaagaaaggaaggggtcctgccatcccatggaatgtgacatgctgctaaacaaggatcaggtctgttttgcgggataccaccttccagtaacttcaggctgagtgttagcatgtacaaggcctcagtggccagccctttctccctggggcccagaaaactggggaagctgaggcagggcttctaatgcacatggaactcgctcctgctcagctggaccctttcccctctgtcctcaagattgctccaccttcccagctcagttccaggctgtggaaacaccatcaacaccggctttgacttgagagacctggaaggtcattctgccctaaaattttgctgagccaaactcaacttcctaccaaggcttccccaacttgctcccacccaccagacacctggagtcacccatgactcctgctccctcttgctccatactcctcaactcttgcccattgctcctgaatttcctttaggccttttctgtccccactgccaaagtttggtccaggccaccatcccttctcccctgaaccctgcagcaacctcctcactggtctctctgctgcctgtctcacccagaaccttcatcttccacccaggatgattttttcttttttttttttgagacggagtcttactttgtagcccaggctggagtgcagtggtgcgatctcagctcactgtgacctctgcctcccaggttcaaacgatcctcccacctcagcttccccaagtagctgggagttcaggtgcacaccaccaagcccagctaatttttgtatttttagtagaggtgggtttcaccatgttggacgggctggtctcaaactcctgacctcaggtgatcagcctgcctggcctcccaaagtgctgggattacaggaatgagccaccatgcctggcccaggatgatctttgtaaaatgaccttgtcactcttcttgaggtggtgtcccctgtcccctgtcctcatctgtcaagatcttccccagtctttaaaggcccagatcaaatgccacctcctccatgaagcctttgcattcattcatcaaatattttttggttacctaaaatgtgccaggcactgtgctaggcatggaagatagaaaagagaataagagctgggcacagtggctcgtgcttgtaatcccaacactttgggaggccgaggcaggtgaatcacttgagctcaggagtttgagaccagcctgggtgacatggtgaaaccttgtctctacaaaaaataaaaataaaaaaattagctgggcgtggtggtgcgcatctgtggtcctagctacttgggaggctgaagtgggaggattgcttgagtccgggaagttgaggctgcaagtgagtcatgatcatggcactgcactctgggtgcagtgcctggtgacaatgcctgggtgacagagggagaccctatctcaaaaaaaaaaaaaagaatatatatatgttttctaaaaagacactacagacagtctggagagatgggcaattatgcaatgccaatgcatgtgcattttctgtctgttaacccccatgagaccgtgagctcttggagggcagggttcattttgggtctggtaggaaggaagaggcagtaactgttgaatgaataagtgaatgattgaaaggctagaccgagctcctccctttgtcatgtatcctccaagtctctgattcagctggtaaccaggtctatggaattcagttgggactggatggcaaatttggggctaaatgataaagaatcaggaaatggttatgttatgaatagaacaatgttttgtgaaatcacaatacttactttcctatacatcagtctgcttgacaattactttaaaaaaaatcaacattatctccttaccaatacttatatattcaggaaattctacctgtaatggaacaatagttaaatgttaaagcactaaagaagctatgtgatatcaaaagattttaaaagggataaaaaacattattaccaaggtgaccagagaatggagtaagctccaggatggcgcagactgcagccagaatgcaagggttcatttccattctacatttactggctgtatgtcattgagcaagttaataaacctctctgtccctcagtttctccatctgtgaaatggggacacatttgactctacctcatgtgatcatttgtgggaattcaatgagtttgtgttataaaatgcttagaataacactggttggccgggtgcagtggctcacacctgtaatcccagcactttgggaggccagagcaggtggattacctaaggtcaggagttcgagaccagcctggccaatatggtgaaaccccgtctctactaaaaatacaaaaattagctgggtgtggtgatgcacgcctgtaatcccagctactagggaggctgaggcaggagaatcacttgaatccaggaggcagaggttgcagtgagcagagatcacgccattgcattccagcctgggcaacaagaacaaaactccatctcaaaaaataaaagactagcacgggttacatagttagtacccttaattacctattgttacaaatatgtaaaattatcctggggactggaggcactgtgggagccctggcagggagggcctctccccaccatggcttttaaggtgtcaggacaactgggtttaaatccctgacctactttcctgaccttgggaaatgttcccaactctaaggcccttttgttccacacttctcagggctttctcagatgggaagcaagtatgctattttagccaggtctgtggtgacacctaatggtaaaatggggaactgcctgatcttactaaacttccatcaacctattaatagtacaagcaataactatatatcacgctcttaccatgtgccagaaactgaaagctgtgtgaactgtcttagttcacagcttaggctgactgatttaaccaatcagcaagtcctgacagccctgcctccaaaataagtcacaacctagcccatcttcttatatcaccactgcctccatgcttgaccaagccaccaccacccagacaccagcctccacctccccatcacctcttcccacttcttctcttgctctccagtccatctaaatcctaaagaaatgggagggtcagtgggaggttttaaagaggaaagtgatctgatctgacttgctttttttttgagactgagtctcgctctcgttgcccaggctggagtgcaatggtgcaatctcggctcactgcaacctccacctcccgggttcaagcgattctactgcctcaacctcatgaatagctgggattataggtgcctgccaccatgcccagctaattttttgtatttttttagtagagacggggtttccccatgttggccagaattcaggctggtctcaaactcctgacctcaggtgatccacccacctcggcctcccaaagtgctgggattacagacgtgagccaccgttcctggccacgacttccatttttaaaagatcactgtagctgatgtaaatggattggagagcgagagaggaagtggggaggtggtggggaggtggaggcaggtctgggtggtggtagcctggttaagcatgaaggcagtggtgatacaggaaagtaggctagtttgtgactttctttggaggcagggctgtcaggacttgctgatgggttaaattgttcagtaggtagttagtcagacatggtcagggcaggagagctcttccccctgcctccccacccaccaggattctcaggcgaccatcaggtgatggtcaggtggttgttaaaactgtctctctaaaataataattggttgcagctggcgtcagaaaaggtggtagactgaaacacctgaaactggtgatcagcagcttcctgataagatcacaggagttgggtgagtgggctcaagaatgcgcactatgaggcaaaatggtggggtttaagtggtatgtggccttctaggaacactcgaatggtaagggaagaatgcctcaagtgagcatgtgtacaactgcagtaaacacactgcgcatgcggcccgtcccaagtgtgggcaggcccctgtgcatgcagacagcccaccccaagggaagaatcaggggagaagtaacgcaactccagaagcatgccaacgtataagaccccaagtcaaaggtcaaaccacacacttgactctctcaagtcgccagcttggcccccttccaagtgtactttacttcctttcattcctgctctaaagctttttaataacctgaaaccacctttgcaaaattatgactgagacagtgaaagagatccaatttaacagactcttgcttcgaacctccaagctgtccttgttcattcctgggtgtaggccgaacgaactttgggagaaacttagtttatggtttatagtttaaacaaagacggtaccagccctttcccaaagcagacttccttcttgcctggagactagattgcctttgtaggactaatattagccacaagattagaaattatggtttaggagtcatgcagctggaggctcaagattctgaactcttgagatcaatgcttgagatattttgcagaccctgcacttgatggatcagctggccccactcaaatcaataaactggctcatctgatcttgtggcccccacccaggaactgactgaacccaagaagacagctccgactccctatgatttcatctctgaccaatcagcactcttggctcactggcttcccccacctatcaagctatccttaaaaactgctccccaaatgctcggggagactgatttgagtaataataaaactccggtctcccgcacagctggctccgtgtgaattactttctcaatttcaattcctgtgtcttgatatcggttctgtataggcagcaggcaaggtgaaccccttgggcagttacaaaactttcactcctgctctggaaacttgccttggtttctcacttatgccacctggattgagttctgtcttctgaggaggcaagaactgaagttgctgcagacccatatggattcaccaccagtaacaaaaccaatccattgctcctctccttggcctgtaagaccctgtgtgatatgaccatgacccaagttgctcccttctcattctcagaggttcagtcacactgacctgctcttttggtctctgcaacagacatgatggcttacgtctgtgctcactcagattcctttatctttgatgggttaaggagaggactcaaggatcaatcttggaattttggcttgaaaaatagatggatttactgaaatgagtaaaacctagggaagagcagatttaggcagactatcttgagttcagttgcccagaggatggagaatcctttttgttctgtttgtctcagattatcccaggagattgcccctgacacaggaatgggaggcggtaataggtgtcagtgttgctcaaagagacccctgggcttctgctgccctggccattgtatgggatagtgccaatgactctttctgaagagtcaacaaaagaataacagaaatcagagtgcttttcaatacttattgctcaagaggatacttttgattatttcttggagaagccagatgggcccacagatgcattagaataggaacttctttctggcaaatgagtccattgaggtggaaatttatttgaaagactcaggttaatgtgattcccacaaaagtgtgtaggaaatgtggccccaaattcctacctaaaatattaagtgtacccattttattcctttggtggaaaacagataatttaagtacaaaggaaatgtatcagcaggaccttggggctcatggaattgagaggcaattgaagaagcaaacttggaaagctcaggaacccagcaggctctcttcctgctgcagggcctttgcacatgctgttccctctgctggaggatcttgcctgcccttcacctggctgactccagctcacttttaaggtcttagctttaatgttgcttccttaaaatccctacctggttctcctgatgaagctggtatccctggcagatgctgtccgggtaccaggtccttttcttttgtagcccttaatatcattgtgacttaataattattcatttgattaacattaacatctgtcttcccaagtagactgtaagctccatgagggcaggggctgtttgtcttggttcctgttgtacttccagaacctagcacagagaatggtagatgaaattatgctgcagggacaaacaactccaaaacctcagtggccgatgacgacagatgtttctttctcgttcatgctacatgtgcattgcagctcagcggtatctgctccatgctgttttactctgggacccagtctgatggagcagcctcagatctggcaagggctgggtatgactcactggtgtgtggcaagcctctatcaatggacaaggcagaggctggtgcagcttgaaggtggttgagcagaattgtgctgaggtcctggcagggaagagggagttagtcctagaatagctgagcgtaaaagacacagactttcccctgaggatctttgtcatccaccacacatgcctcttccaataaagctgagttttagagaggttaagtgatttgctcaaggtaatacagctgcaagtagcatagacgttaatatggtttggtctgtgtccctacccaaatgtcacgtcaaattgtaattctcagcgttcggggggtacctggtgggaggtgattggatcatgtgggcggatttcccctttgcttttcttgtgatagtgagtgagttctcacgagatctgatggtttaaaagggtgtggcactttcgcactctttctctctttcttgctaccatgtaaagaaagtccttgcttcctcttcaccttccgccattactgtaactttcctgaggcctcccagtcaggcttcctgttaagcctgtggaactgtgagtcaattaaacctgtttgcttcataaattacccagtctcaggtagttctttatagcagtgtgaaaacggactaatacagacattaagaacataggctttggaatcagaaagacctgggttcaaatcctgcctctttgtgacaatgaaacatcagcataatgatagtaatacattattacacactgaataaaataagaatccatgagtctatgctgttaataaagaaataaatgggagcaaaggagagctcttccttacaagttgaatgccaaacagcttattaattacaaaggaaaaaaaatgacaatatagtggagaaacctgacaggctgcaccttaactgagtgatcaaagttaacatcaccagtaacaggacaaaccacacttctctggtattcctgccaaaagtacataatctagtcatgagaaaacaattagacgaactgaagtttggggacagtctacaaaataactggcctgtctctttaaaaaatgcctttatctaagatagaaaaagaaaggagctgttccagtttaaaggagacagaagatatataataactaaatgaaacatgtaattctgaactgaatactgcactggaaaagattcgctacaaaggacattattgggaaagctggcaaaacttgaacgtggacgataaactaaataatagtatattatttattgttaaatttcctgattttaataattatactacggttacaaaagactagatccttgttcatctgaaatctttagaaaaatagaggcatgatgtctgcaacttactttcaaatgattgagattgatctatctatctatctatctatctatctacctatctatctatctatctaccaatcaatcatggatgaaaagagtcacactgtaaaatatttgaagaaacttattctgaaccaaatatgagtaatcatggcccgtgacacagccctcaggaggtgctgggaacatgtgacccaggttgttggggtgcagcttggtttcatacattttagggaggcatgagacttcaatcaaatgcatttaagaaatacattttttaaaaattttacaaaataacaataaaaaattactgcataaagacaacaaaaagacaatgaaaatcacccaaaatatcataaactggatatattcatggttaaaaaaaaaagaaatacattggtttggtccagaaagacgggacaacttgaagcagagattgggggaggggggtgttccagcttataggtagatttaaaatttgtctggttggcaattggttgagtttatctaaagacctgggatcaatagaaatgaatgtctgggttaagatactatggagaccaaagttcttatttgcagaggaagccttcaggaagcaggcttcagagagaacaggttgtaaaatatttcttatcagacttaaagtctgtgttgatgttaatgccggggagatataaggaggcatgttcgactcccacttcccatcacgtcccaaaacagtctctcaagttaaatttgaagagccctggctgagggggaagtccattcagatggttgggggcgggggacttagaattttttttctcgtttacactatatttatctgagagagagaattttaaaatagatgtggcaaaatgttagcagtaagtgattcgaggtaaagggtatatgggaaatctttgtgctattctcataactgtttttgttaagttggaaattatttcagaataaaagttaaaaacttacaaaacaacacatttaaaaatcatggtttctgtcagtttgggttcacaagaaattaaaataaaaagaaaaaaagaaaaaaatcatggcttctctagtctatatttcatcaaaattccaattttagcaatgtgaaaaaaactgtcagaactgaatacacgtggccaggcgcagtggctcaggcctgtaatcccagcactttgggaggcctaggtgggcggatcacccaaggttaggagtttgagaccagcctggcccacatggcgaaaccccatctctattaaaaaaaaaaacaatattagccaggtgtggtggttcacacctatagtcccagctactcaggaggctgaggtaggagaatggcttgaacccaggaggcagaggttgcagtgagctgagattgtgctactgcactctagcctggatgacagagcaagaatctgtctcaaaaaaaaaaaaaaagaaaagaaaagaactgagtacacatgaaagggtgtgatcagaaagtgaggcaaatcatttcatttcgcctccctatgcctcagttttctcatctgtataatggggctgataattcttagtgtggctttgagtacaaatcacaaaatggatgaaaaatctttagcattaagctgacacatagtaaatgctttaaaaatgctagctaaaaagctagtagaaaacttttggggtaatgaatacattaattatcatgattgtggtgacaatttcacaagtatatgtatgcacatgtcaaaacttaccaaactctgttttttaaatatgtacagttccttgtatgtccattatacttccacaaagagataaaaacaaactactataagctcctttaaaccaacttctatttaccccatgctctccagtcccctgtaaaacacagcaacagggaccgtgcccttctgagcatctggtgcactgtggcatgtgcaggagcccctgccccacccagacaactccaagttcaccaagagtcagctgtgcttgttcacaaacctatttatggccgttgatcgaatcattgtaaccacccaatttaatttaatatgcaggccgggcatggtgcttacggctgtaatcccagcacttttggaggccaaggcaagtggatcacctgaggtcaggagtttgggaccagcctggccaacatggtgaaaccccatctctactaaaaatacaaacgttagccaggcgtcatggtgcgtgcccataatcccagctactcgggaggctgaggcaggagaattgcttgaacctgggaaggccaaggttgtagtgagccaagattgcaccactgtactccagcctgggcaacagagtaagactctgtctcaaaaaaaaaataaataaataaaataatatgcaaactgacaaaatgtaagagaccacaaaattatagattatagatgaatctcagaaacatttatgttgagtgaaagaagctagacagaagagagtccatgccatctgattccattcatatgaagttttagaaaaggcaaaactaatccatggtggaacatcagaatgatggttttggggtcagggattgctgggaaggggcatgagggaactttctggattgatggccttgttttacatcttcattgttcctctctgagcaggaaggacaagggagctgagagacccaagaaacaggcagacaaatctagtttctcagaaacatttaatagggacttacaagcaaaagcagtatcttgggcagtctcaggatggtggctccctgcaccttccctcctgaaaatatcctttttatagcaagctttcagagtaaagcttgtgcagctggtcacgtctcagacttcctttggaaactcgtgaccactgtggaggttagataaacatctttatgaggggtgacctgtgctataggcattgtgtgtttaagagggattgtctatgctacagcaacacgttggtatgcaggagtcaaacatcggtcatcatggtttcacttcaagatggcgtcactcttgctatgcaacaggtatttttctacattcatacacatttgggttacacaggtgtgtgaatttgccaaagctcagaatgatccgcttaagatttgtgcattccaccacatgtaacttttacataagcaaatattgaactctggttaatgatacagatgttaaggccgggtgtggtggctcatgcatgtaatcccagcactttgggagtccaaggcaggcagatcactggaggtcaggattttgagaccatcctggccaagatggtgaaaccccgtctttactaaaaatacaaaaattagccaggcgtggtggtgcatgcctgtaatcccagctactcaggaggctgagacaggagaattgcttgaacccaggagacagaggttgcagtgacccaagatcgcgccactgcactccagcctgggcaacagagcaagactctgcctcaataataattaataataataataataatatatacagatgttgaagggtttagaaagaagcgtactgatatttgcaacttactttgaaatgcatcaaaaagtaagatgaccaggcatggaggctcatgcctgtaatcctagtactttgggaggcagaagcaggagcccaggcggtcaatttcgaggccagtccgggcaacatagtgagactgcccccgctacaaaaaaaattaaaaattagccaggtgtcagcacatgccagtagtcccagctacttaggaggcagacataggaaaattgcttgagcccaggaggttgaggctgcagtgcgctgagattgtgccactgcacttcagcttgggcaacagagtgagaacctgtctaaataataataataataagatgaatggatggacagagaggtcaacatttcataaagcaaatataacaaaatgttacttgcagaatctaggtgggatatacgagggtattaactgtaaaattatttaatattttctgtaagtgtgaaatgtttcatttaaaatgttggagaaaacaacaagcaaaagacccaatattggcaagttgttagaatactgctctctagtaagacatgagcagggcaactgtgagagagaaattttcaagaagtctgcatgcaggtcactttacaagtcttgagttcttattccattttaaagatgcaaaaattggaaatcatagatgtagcaatgaactggaattctgatcagtggactcctcaaagaaaagccttagccccgtttcaaaagattggagagtgaatacacatttacatgttttaagttaaaatgaaacactgaggctttgtatctagcattttaagacttttaaaaaaattcactgactgccagcccatatagcatgtttgtgtgaatcagaaacagtcactccctcttctggctggatacagtttcacagcgagggaacaaagctagatttttgtccttccttggctgaatgtgcttgtgcaatatacatcgcactcaactgcccatggcatgctagacactaatttccaggcccaaacacaaataggtaagaggactgtggctggttgtatcacctatcccccaagtctgaggggcacctcacactcaacagaaaggtccctaacagaatgccaccctccctgccaccactccccactgccagctttcctgggcctcgctccaatttcatgatcaccttgacctcctccttccctgtctgtccatctcctaagaatggggctggtggtgatgagaggaggaaggagggggatctcaaggattatcagggtgataatcagagaaactgacttttcagaaaaagtgattaataaccctctcctgccctcaacaccctacctgttttcaaaacgtggagatgcggggcattctaggtggtgcaaggaaggaggtctgaaaagaaggagaaatgagagcaggaggtctgagggactctttttgatccttagtgccttcccacgcacacctagcagtggttgtcctgtccccacggcccctccatggggactacagactagcagggacatgtatcttgatgccaggcccaggaggccagaatggctccaggtcctagagggctgggtggcctagccctcagccaaggctcagagagggaagctagagcctccaatacccctgactctgaatcagcccccactgcactaagccagcagagcttagcagcttggattcaaggacacctctgtggtccctcagagtgtttcagtcctgcctgcaacattcatgccctgtgtgaccttgggcaagtcactttacctcttgaggcatcagattcctcagctgtacaggtctaatcatagcactgttctcctgggatggttgtgatgttcaatgtgtttatgcagatgcagtgcttggcacaggacatggcatacagagaacacccaggaagcagcagtggcccttgcaatccctgggatcccatgcaatcctctgggtcctgtgaaggagatctctattcctacacacttgtcaactgtaagacaaatgctgaaaacctttttgtggtctcaacgatcaggttataaactcagctgaagaacttggtgaaagtattttgaacacgatgaagagacatttaaacaactgaattaaaaggtcttcgtaagtattttcccaagctggaaagcagctgtgagtagataagaacccttcttccatcgttttgcggacatcagtgaataacttgacacagtctacagaaggacagattctggagattgcttcagatggcttccagaaacaaaaggttgttgtacaaaagtcattacatcattttgataaggaatgaattatcagtgtccacctctatcagagaagggggttaatatcattcttctggattccaagtttgtatgttcaactgtctactagttaccttcactgggatgtctaacaggcatctcaaatccaacatgtccaaaacagagatcttgacccttgtttcttgatcccaaactgctctacctgtggtcctgtctcattgatggcaatgctatccttccattttctcaggtgaaacaccttcaaatcatcctccactcttctttctctacatctggtcaatctctgtgactctacctttgaaatatctccagaatccaactacatctcaccatttctatgactaataccctggtccaaggtatgatcatctttcacctggattattgcaaatgcctctttcctgcccttcgtgtttctagccttgctctgctatagtcaagacaagcagccagagtaattttgttaaaaataaattagattatgtcaatactagacagatgtggtggcacacacctgtagtcccagctagttgggaggctaaggtgggaggatcacttgagctgggatcaacctactgcactccagcctgggcgatagagcgagaccttgtcttgaagcaaaaacaaaaccaaaaaccagattatatcaatactgtactcaaaatccttgatgtccctctatctcttccagaactaaatcctaaatcctgtaagactctctgcgaattggctctgtgctatccctctgaccttatcctcacaccactccagcctcattgtcattccttgaagattgcagacatgctccccacttacaaacttgcactggccgttccctctgctggaatgctcttcccagatattttcatgactcacttcttcacgtcctgtaaggttttttattttttttagttgagacggagtcttgcactgttgcccagtctggagtgccgtggtgtgatctcggctcactgcaacctccgcctcccgggttcaagcgattctcctgcctcagcctcccaagtagctgggattacaggcacccatcaccacacccagctaattttttgtatttttagtagagacggggtttcaccatgttggccaggctggtctcgaacccctgacctcatgatttgcccaccttggcctcccaaagtgctggcattacaggcatgagccaccgtgcccagcccacgtcctgtaagtctttacttaagtatgtcctataaagaggctgaccctgaccatcctttctgaaactgcaacctacccccaccctcgaatccctctctccctgctctatgtttttccccatagcactgatggcttggtaagatattacataatttttatttagtatgcttattgcttggtttgtttgtttgtttgtttttgttttgagacaggacttcactctgtcacctaagctggagtgcagtgccacaattgtggctcactgcagcctatgcctcctgggcttaagcgattctcccacctcaacctcctgagtagctgggaccacaggcccacaccaccacacgcagctaatttttgtatttttgttagagactgggtttcaccagttgcctaggctggtcttgaactcctgacctcaagttatctgcccgccttggcctcccaaagtgctaggattacaggtgtgagccaccgctcccagctatggttagtgtttattacctgtctcctcctctacaatgaaagctccatgtgggcagggatatttgcctgttgcgttcactgatgtaactctttctttatagcatagtacctggtgaaatagtataggtgctcagtgaatatttgttgaatatttgggtgtcctctaattcagttccgacactgtctacacagagacagtgtcagttcacacaagttaagggctccgtccccaagactgccacccgtgcccatccacccgtgcctaccagtccgggcctccagaacttctgactgatcagcttcaagttgagcttcccacgaccctctctttggattcgattagtttgctggagcagctcacaggactcagggaaacacttatgtttactgatttattataaaggatattgcataggatacagatgaagagagtgaagggtgagatttgggggaagaggtgaggcacttccataccttccccagggcgccaccctccaggaacctcccagtgttcagctatttagaagctcaccgaccctgtcctcttgggtttttctggaagcttcatgacatgagcattccttcccctaagtaggaccctctcgtgtaagggtcttaagaccccaaatcagaaaagtaggtgaacattagaatcctgccttggggcaggagcaaggagggcaggagaaggccagaaagaggcccacctgaggcctgacacaaacatgatcgcaaaagattggaacaagggctgtgggagttaggagccaagaacagtgggcgaaaaccgaagtatatacaacaccacacctcgacacgaaaaagccttgctgagagaaatttcaaaagactgaaataaatggagagacatgctatgttcatgggccttatgacttgatattaagaaattatttcttaacaaattcatctacaaattaaacacaatcccaaggaaaattccaaaagacttttgtaaaggttaatgagataattctaaaccttatatagaaatggaaaggacctaaaataaccagagtaattaaaaaaaaaaaaagtcagctgggtgtagtggctcacacctgtaatctcagctctttattacttcctctgcttgaagaacttcctttattatttcttgtagtgaaggtctactgcaagtgaaatatgtctgcttctatttgtctggaaagtcttttttttgggatacctaatagttgtacatatttatagaatacatatgacaatttgatacatgtatacaatggataatgatcaagtgagggtaattaggaacctcaaacatttatcatttccttgtgttggggacattccaaatcttctcttttagctattttgaaatatataacaaattcttattaactgtagtcaccctactgtgctgtcgaacactagaactgattccttttgtctaattgtatttttatacccagtaaccaaactctctctatccacccttccctctacccttcccagcctctggtaaccaacattctactcactatatccatcaagtctatttttttagctcccacatatgaatgagaacatgtgatatttgtctttctgtgcctggattattttacttaacataatgacatacagttccatccatgttgctgcaaatgacagaatttcattgtttttatggctgaataatatttcattgtgtgtatatactgcattttctttatccattcatctgttgatggacacttaggttgattccatatctcagctgttgtgaatagtgctgtaataaacatgaaagtgcaggtattggctgggcacagtggctcacgcctgtaatcccagcactttgggaggccgaggcgggcggatcacgaggtcaggagatcgagaccatcctggctaacatggtgaaaccccatctctactaaaaatataaaaaattagccgggcctggtggcgggtgcctgtagtcccagctactcgggaggctgaggcaggagaatggcgtgaacccgggaggcggagcttgcagtaagccgagatcgcgccactgcactccggcctgggcgacctagcgagactccgtctcaaaaaaaaaaaaaaaaaaaaaaaaaagaaagtgcaggtatctcgttgatatattgatttcctttcctttggatagctacccaatagtgggattgctgaatgatatggtagttctatttttagttttttttttttttttttgaaatggaatcttgctctgtcacccaggctggagtgcagtggctcaatctcggctcactgcaacctccacctgctgggttcaaacaattctcctgtctcagcctcctgagtagctgggactacaggtgcatgccaccatgactggctaattgctaatttttttttttttttttgtatttttagtaaaggcagggtttcaccatgctggccaggctggtcttgaattcttgatctcatgatcaaccctccttggcctcccaaagtgctgagattacaggcgtgagccaccacacccggcctatttttagtttttttaagaagcctccatactgttttccatagtgtctgtactaactttcattcccactaacagtgtatgggcattccccttcctctgcctccttgccagcatctgttattctgtcattttgataatagccatttttaatgggttgagatgatatctcattgtggttgtgatttggatttccctgatgattagtgctgttaaggattttttcatatacctgttagccattcgtatgtcttcttttgaagacatagagatgcctattcaggtattttgcccatttttgaaactgataatttgatttttttttttttttttttttgctgttaagttgtttgaataccttttatttctggttattagtcccttgttggatggatagcttgcaaatattctctctcattctgtatgttttctcttcactttgttgattctttgttcgtttgctgtgcagaagctttttagcttgatgaaatcccacttgtctacttttacttttgttgccagtgcttttgaagtcttacttaaaaaatatttgcccagaccaatgtcctgaaggatttccccaatgctttttttttttttttttaatttttttagtatttattgatcattcttgggtgtttctcagagagggggatttggcagggtcataggacaatagtggagggaaggtcagcagataaacatgtgaacaaaggtctctggttttcctaggcagagggccctgccgccttccgcagtgtttgtgtccctgggaacttgcgattagggagtggtaatgactcttaacgagtatggtgccttcaagcatctgtttaacaaagcacatcttgcaccgcccttaatccatttaacccttagaggacacagcacatgtttcagagagcagggggttgggggtaaggttatagattaacagcatcccaaggcagaagaatttttcttagtacagaacaaaatggagtctcctatgtctacttctttctacacagacacagtaacaatctgatctctctttcttttccccacatttcccccctttctattcgacaaaaccgccatcgtcatcatggcccgctctcaatgagctgttaggtgcacctcccagatggggtggcggccgggcagaggggctcctcacttcccagacggggcggctggccgggggggggctgccccccacctcccggacggggccaatgttttcttctaatagtttcatagtttcaggtcttttatttaagcctttactctatttctatttgatttttatatatggtaaaatatataaagttgtctagtttcattcttcagcatatgaatattcagtgttcccagcactatttaatgaagagactattattaatatttctccaacgtatgcttttggtgcctttgtcaaaaatgagttggctgtaaaggcatggatttatttctgggttctctattctgttccactggtctaagtgtctgtttttatgccagtaccacgctgttttggttaactttgtagtatattttgaagtcagctagtgtgatactaccaactggtttttttgctcaggatttctttggttatttggggtcttttgtggttccttatacttttttttttttttttttaaagatggagtttcgctcttgttgcccaggctggagggcaatggtgtgatcttgggtcaccgcaacctccgcctcccgggttcaagcgattctcctgcttcaacctcccgagtagctaggattacaggcatgcaacaccacacccagctaattttgtatttttagtagagatggggtttctccatgttggtcagcctggtcttgaactcctgacctcaggtgatccacccaccttcgtctcccaaagtgctgggattatgggcataagccaccatgcctagcccctttacacattttagtattgttttctcttatatctgtgaaaaatgtcattggaattttgatggggattacattgaatctgtagattgcttttggtagtatgaatattttaacaatattaattcttccaatccatgaacatgtgataatctttccttttttttgtgtatgtgtgtactcttcaactatttttttctttctttctctttctttctttctttctttccttctctctttctttttttttttttttgagacagggtctcactctgttgcttaggctgaagtgcagtggtggcatgatcatggctcactgcagcttcaacctcccaggctccagcgatcctcctacctcagcctcatgagtagctgggaccgcaggcatgtgccaccatgcccagctaatttatgtgtttattttttgtagagatggtatctccctatgttgcccaggctgaccttgatctcctgggctccagtgatcctcctgccttggcttcccaaaatgctgggattacaggcactgtagccagcccttcctcttcaatttctttcatcagtgttttatagttttcattgtaaaaatcttttacttctttggttaaatttattcctaggtattttttgtggctattgtaaatagaatcactttcttaattttttttcagattgtttgttgttggcatatgtaaatgctactgattctcgtatgttgattttgtatcctgcaactttactgaatttccttatcagttctaaaaatatctggtatctttacatttttctaaatataagattgtgttgtctgcaaacaaggaaaatttgacttctttctttccaatttggatgcccttaatttatttctcttgcctaactgctctggctgagacctaaagtgagaatctctgccttgttccagatcttaggggaaatactttcacattttccctgttcagtataaagttagctttgagttttttatacatagcctttattgttttgaggtatgttccttctacaaaaactgctgagtttttgttataaagggatgctgaattttatcaaatgctttttcagcatctattaaaatgatcacatggcttttgttcttgaatctgttaatgtgatgtgtcatgtctttcgatttgcatatgttgactcatccttgtatctctggaatgaaacccacttgatcatggtgagtgatgtttttaatgtgttggtggatttgattgctagtatttcattgaggatttttgcatctgtgttcatagagatattggctgtggttttattttcttgttttgtccttgtctggttttggtatcaaggtaattctggactcacagaataagtttagaagtattccctcttcaattttttggaatagtttgagtagaagtggtattctttaaatgttttgtggaatttcagcagtgaagccaatcagttcctaggcttttgtttgatgggagactttttgttactgatttgatcttgctattcgttattgttctgttcaggttttgtattgtttcatggttcaacactggtagattgtacacgtccaggaatttgtccatttcttctaagtgttccaatttgttggtatacagttgttcataatactctctaatgagcctttgaatttctctggtatcggttgtaggcctcctttttcatctctgcttttatttaggtgggtcttctctcttttttattagttagtgctcctgaacaaccaatgtgtcaataaaaaaattaagaagaaaattttaaattgttttgaaacaaatgaaaatagaaacacaacatccctaaacctatgggatacagcaaaatagtgtataaaaagggaggtttatagcaataagcacccatatccaaaaaagtagaaagggctaggtgcactgtctcacacctataatcccagtactttgggaggccaaggcaggatgattacttgagtccaggagtttgagaccagcctgggcaacatagtgagaccttgtctctacaaaaaataaaaaataaatcagctgagtatggtggcccatgcctgtggtcctagttacttgggaggctgaggtgggagggttccttgagcccgggaagttggggttgcagtgatctgtgattgtgctactgtactccagcctaggtgacaaagcaagatccagtctcaaaaaaaaaaaaaaaaagtagaaagactttaaataaacaacctaatgatgtaccttaaagaactagaaaagcaagaacaaaccaaacccaatattactagaaggaaagaaataatagtgataaaaacagaaataaatgaagttgaaatgaaaaaaatacaaaagatcaatgaaacaaaaagttggttttttgaaaatataaacaaaattaacaaacctttatctagactaacctataaaaaaagagaagatctacataaataaaatcagagatgaaaagggagtccttacaactgatagcacagaaattcaaaggatcattacagagtattatgaacagctgtataccaacaaattggaaaacctagaagaaatggacaaattcctggacatgttgtttaatttccatgtatttgtacaatttcaaaagttcctcgttatttatttctagtgtcattccattatggtcagaaaagatgtttggtataatttaaatttttaaaaattggttaagacttgttttgtggtctaaaatgtggcctatcctggagaatgttccacgtgcagatgagtagaatgtatattcgtcagcagttggatgaaatgttttgggcttgggctatgagtctccacctgccttgggtagctctcctgagccttggaggaccagctcatcatgaatcctaggctttaactgttccttgctgctatctgtaagtaataaatcttcatgtaacttgtgtgtgtgagcattctgcctcaatagacttgagcaagcaacaaagcgcagactaagatgcagagggctgaggtggtaaccagtgcacagtgaacctgctttacagcaggtcctgtctcttcctcaaggagattattactctttagaactcaattcatttggtcaccttgttgtcatagtaagtaagtaggtagctactcagacacgagcagggcaggagaggccccccaaacccaggaatgtcaggcaaccatcaggtgatggtcagacagctgttaaaactgttgctttaaaataataattggttgcagccggcgccagggaaaggcagtctcccaatagataaaaacacctgaaatgggtgatcagcttaccgataagatctcaggagttgggcgagtgggctcaagcatacgcactaaaaggcaaaatggtggagtttaagtggtacgtagccttctaggaacacttgaatggtaagggaagaatgcctcaagtgagcatgtgtacaacgccagtaaacacactgcgcatgcggcccgtcccaaatgcgggcaggcccctgtgcatgcagacagcccaccccaagggaagaatcagggaagaagtcaggcaacctcagaagcatgccaacgtataagaccccaagtcaaaggtcagaccacacacttgactctctcaagtcgccagcttggcccccttccaagtgtactttacttcctttcattcctgctctaaagctttttaataaacgtttacttctgctctaaaacttgccttggtctcccgctctgtcttatggccctcagttgaattctttcctctgaggaggcaagaattgaggttgctgcagacccatacagatttgccactgctcacattgtgatcttagttctgtgatgagctcaagaaaagttatgattttataaataaattatctttttctcttttttaggatgagtgcaccattctcttgcagccctttttgtttttttttgagacagtgtctcgctctgttgcccaggctgcagtgcagtggtgcagtctcggctcactgcaacctctgccttctgtgttcgagcgattctcctgcctcagcctcccgactagctgggactacaggcatgcaccaccatgcctggctaatttttgtatatttagtagagatggggttttgccatgttggccaggctggtctcgagctctcgatctcgagtgatccacccacctcggccttccaaagtgctgggattacaggcgtgagccaccgtggctggccttctcttgcagctttctatatcctaagcagaaatggaatcccatattaaaatttttctaagatcaggtaacttcgttttgtttctacatactaacaacgaacacgtgaaatccccaaattacaatggtaccatttaaagtatcttcaaagaaaacaaaatactaaggtacaaacttacaaaacacatacaggatctgtatgctgaaaattacaaaatgctgatgaacaaattcaaagaagacctaaataaagagagacattgtgttcatggattggatcacttaacgtagtaaagatgtcagttctccctaaattgatttatatattgagtgcaattcgtgtaaaagtcccagagaggcttttgtagacatagacaagcttgttctaaaatttatatagaaaggcaaaactttgtgaatatactcaaaattactgaattgtatactttaaagggtgaactttggggtatgtgaattatatctcaataaagttgttataaaaacatttaagctgggcatagaggctcatgcctgtattcccagcacttcgggaggctgaggtgagtggatcacttgaggtcaggagttcaagaccagcctggccaacatggttaagccctgtctgtattaaaaatacaaaaattagccaggtgtgatggtgcacacctgtaatcctagctacttgggaggctgaggcaggagaatcactggaaccctgaaggcagaggttgaagtgagccgagagtgcaccactacactccagcctgggcgacagagtgagactcatctcaaaacaaacaaacaaacaatgacaacaataacaacaacaaacatttaagagggcccccaccatcaggtgctgcttctgcccttgcagagcctgagggtgagaccctcatgttttgtgcccttgtacctccctgctacaccctagtcctggacctggtggaagatgcaggtatttatcctctaaattctgattctggggtttaactctcctggcttgccctctgtatccatccaagctcaggactgtgggcgggtgactcccttgggctaagacacaagaagccatcaggctgcgtgtccatcgatgtctgtggcattgtcagcgtctgccactcttagtgtcatctggctaccgccatcttccctgtccttctcctcctggcctcggttctctttcaaggaatataccactttcccaccctggggccctcacacaggctgtttctcctccctgaagcactgtccccacccccttcctatctcatccttcaggactcagcccaaatgtcacctcctcagagagggcttctcttcctgccctgtcccaaaatgttctccattattctctctcataacactcagaatattttcttaatagcacttatctccatttggaaagtgtgtactcatttgtttttctaagtatttagtgtctgtcttccctaccaggcagtgagatttaggagagagggactgggtctgttttgctcgtggctgtatccaccatatacttctctgtgcctggcacataggtggtgctcaataaatgcttgtcaggtgctttatgaatacaacacactcctggccctgctcccctaaacaagcactcctaagtgggggagggaggcattgaggcaggcacctgtggcaccaggtggtctgtgctatgatgggcaggtgagcagaggagtgcaggaagctaaatgaggcagaaattaattctgggagctcagagagggaagaaaatctagagagcaagtgcaatgtgaattgggttttgaaggatgaataggagagtgctgggtacgtaaggacattggaagaaaatctcaggcagaggtaagagcatagagaagagtttggaatagataagagccactgcctctggctgtgtgagtgcatgtgtgtgcatatgtgcgtgagtatgaatgtgtgtgtgtgtgtgtgtgtgtgtgtgtgtgtagggtggtagggtggtagggtgtgaatctggagatgcaggtagaaccctggacacaaaaggtttttaaggccaggcatggtggctcatgcctgtaatcccagcactttgggaggccaaggcagggagatcacttgagcccaggagatggagaccagcctgggcaacgtggcaagaccccgtctgtacccaaaaaatgaaaaattagctgagcatggtggcgcgcctgtagtctcagctacttgggaggctgaggcaggaggatcacttaagcctgggaggttgagtttgcagtgagctacaattgtgccactgcactccagcctgggcaacagagtgataccctgtctcaaaaataaataaataaaattaaataaaaggtttttaacacccagctaaagattgattctaacttccagcagttttcttagtgtgaagtcagtttcactggagagggtaggtggtacctgtctgggtgatttgatgtaggactcataattctttcttttctttttttttccttttgagacagggtctcactatgttgcccaggctgatctcacactcttgggctcaattgatcttcctgactcggcctcccaaagtactgggattacaggtgtgagccaccatgctcagctgaactcataattttataaggattttaaaatagtaaatcattttaatagtttccttttaaagataaatgtatataaatcaaaaaggcaagtcgacttgaagaaatatattaagtaaataataaatacaggtgaaaccccagggcagacatttggcaaatgctgctgtggatggtgggagccacagcaaggacagaatgagtgaagagggtggtggggctggagttgaaggcccaactggatggactggggaacgtgcactagtctggaaggcatgaggccagggcctgtgggacctggaggaagggagaatctacaggcctgggagcctgattggatgtgggaatgaagcgggccaggagttgagggacgccctagtttggggcttgaaggtaccaggctgcttctaacaggaggtgtcacagttggccatgttacagaacctcttttctaagacttggattcttattcactgcaatgaaacaaaatttgcaaacctctgtgtgacaaagcgttccttcctgtgtccccagtcaaatgctgtagcagacgtggttggcaccctgtccacacccttcccttgacccatcttggaattgacatgcagagagtaccatgctcaccagcagctttctgtgtctttctgcccaagggcattctctggccagggccagctcagcctacacacgtcccagactcaccatggtccagcagaagatgggagctgggtaaatggcccagcctctcctctcagtggcacagctctgaggtgtggtctgcagtctcccagagggacctcagccaaactgagccccagctgtccacagcaggaacccattcattagcgccctgtactggcttccttcccttccctggatggcttcctgactctcaaattgtgcttcctggaactacctcccaaagaaaccacctgcacccaaatttttgcctcagggtctgctttcatgggaaccccaaagcaaaacaagcaagaaatgttagggtcaccactacttccctagcttcctctggagttgcaggcgtcatttttccagttgatgtgggtcctcacagtccaccatatgcagctgtctttgtggacacaactggaggcacacgatcgggatgagggcagagcagtccccctttttaattgttttaattaagtcaacaattggcagcccttgggtacatgccagagtcagaggtgtttgaaccagagcaactccatcttgaataggggctgggtgaaatgaggctgagacctgctgggctgcattcccgggaggttaggcagtcttggtcacaggatgagacaggaggtcggcacaagatacaggtcacaaagaccctgctgataaaacaggatgcggtaaagatgccggccaaatcccaccaaaaccaagatggcgatgaaagtgccctctggtcatcctcactgctcattatacactaattataatatattagcatgctagacaacatgcccaccagcgccatgacagtttaccattgctatggcaatgtccaggagttaccctatatgatctaaaagggggaggaactgtgagttccaggaactgcccacccctttcctggaaaactcatgaataatccatgtttagtatatgatgaagaaataaccaaaaagtaaccacccggtagctctcagggctgttctgcctttggagtaaccattcttttattcctttactttgtttttttgggtctcgctctgtcgcccaggctggagtgcagtggtgcaatctcagttcactgcaacctccacctcccaggttcaggtgatcgtcctgcctcagcctccagagcagctgggaccacagatgtgctccaccacgccaggctaattttttgtatttttggtagagacggggtttcactatgttgcccaggctggtttcaaacttctgacctcaagtgatccaccctccttggcctcccaaagtgctgggattacaggcgtgagccaccatgcctcccctattcctttactttcttaagaaacttgctttcactttatgaattcgcctcgagatccaagagccctttcttagggtctggattgggacccctttccggagacaccagcataacctttgtttcagttatttggggcatggaggaagaggttttcttgcctcagggcctttgcaactgctgattctgccacctggaatgtttccccctaagatagccctaactaagtccagatccctcacttcattcaggctcaaatagcatctcctcagagaggcctctctgaccacattatcttaaatatatccctttctctttcatcctattgtcattatagctcctggcattatatctttttaaaaatcaactttattgaggaataattcgcccacaataaaatacattcacttgaagtgtacagtttggagttttgacaaatacgtgtttcctggtaaccaccatccaatcaacatttccatcaccccaaaaggttcagttagaagattccctccctgccccagctgtcagaggtgtttgaaccggagcgactccattttgagtgagggctgggaaaatgaggctgagacttgctgggctgcattcccagaaagtcaggcattcctagcctctagaggtttatgattaagggaacaaattaataatgttcactaaacagacccagattgggagtgtccagatatcccaatatctggacaaaaaaggcatttctttttctttctttttttttttttttttttgagatggagtcttgctctgtcactcaggctggagtgcagtggcgcgatctcggctcactgcaacctccacctcctgggttcgagtgattctcctgcttcagcctccgagtagctgggattataggcgcccaccaccacacctggctaatttttttgtatttttagtagagacggggttttaccatgttagccaggatggtctcgatctcctgacctcgtgatctgcccgcctcagcctcccaaagtgctgggtttacaggcgtgagccactgcgcccggccgaacaaaggcatttctaattttgctctaaagataatattgattcttgagcaatatagtaattaagaaaattaattctttatcacaaacccttgtagcagagcacatctccccatatatacgaccattgtacctagggtggatgcattcttccactgacttttttgttttgttttgtttttgagatggagtctctctctgtcacccaggctggagtgcagcggcacgatttcggctcactgcaatctctgcctcccgggttcaagcgattctcctgcctcagcctcccgagtagctaggattacaggcatgcaccaccatgccctgctaatttttttatttttggtagagacggggtttcaccacgttggccaggatggtctcatccctttactttcttaataaacttgtttttgctttgcactgtggactcgccctgaattctttattgtgcaagatccaagaaccctctcttggggtttggatcgggacccctttcctgtaacacaggcactcactgatctgcgttggatcactatagcttagctttacttttctagaatttcacacccatggaataatctggcatgtcctcttttgtgtctgatttcttttgctcagcatgatgtttttgagattcacctatgttgttgcgtgtaccaagggttcattctgttttattgccgagctgtatcccatcgtacaaatgcaccgggttgcttatccactctcctgttgatgatggacagctgggctgtttccagttttcaactattagaaataaagcagcacgccaggcacggtggctcatgcctgtaatcctagcactttgggaggcctaggtgggcggatcatgaagtcaggagttcaagaccagcctggccagcatggtgaaaccccatctctactaaaaatacaaaaaattagctgggcaaggtggcatgcacctgtaatcccagctacttgggaggctgaagcaggagaattgcttgaatccgggaggcggaggtttcagtgagcggagatcacgccactgcactccagtctgggtgacagagcgagactctgtctaaaaaaaagaaagaaagaaagaaagcagctatgaacactcgcatgcaagtctttgtgcaaacataggtgttacaggaaaggggtcccgatccagaccccaagagagggttcttggatcgtacacaaggaaggattcagggcaagtccacagagtaaagtgaaagcaagtttattaggaaagtaagggaataaaaggatgaccactccatagacagaacagccctgagggctgcgggttgcccagttttatggttatttcttgatatgctaaacaaggggtggattatttatgcctcccttttttagaccacatagggtaacttcctgacgttgccaaggcatttgtaaactgtcatggcgctggtgggagtgtagcagtgaggatgaccagaggtcactcttgtcaccatcttgcttttggcaagagcttctttactgcaacctctattatcagcaaggtctttatgacctgaatcttgtgctgaccttctatctgatcctatgacttagaatgccttaaccgtctgggaatgcagaccagtaggtctcagcctgattttacctggccccattcaagatagagttgctctggtttacacacctctcatatagggacatatctgtatgttttcatgtctcttgggtatacctaacagtggaattgctggattaccaactggcattatattacctatataatatgaggtattatacaggtaagctccaggaggacagagactgctcattacagaatgtgcacagtgcccagcacacacatggcatgtagccagtgctgcaagtccacctgaatgagtaaaaagccagccagcctgatttccaaacttaagggctacacccaggaatttgttgttctgcctcctccccatccacaggctactgctggggttcctggcaggtgtgggggctgggaggggaagggagttgggggagggggcctggacacttttgtgaaccctgttgaggttgacaaaggagaggggtcaccatggtcatgccaggggtctctatcccacacctggaatttctcttagggcttcctgtgatgctgagatggggcagctgtgtccctggccccactcttctcccttgatgaaactgcctttgcagaaattataacagtaagaaaattaggacagtgaaagagacccatctaaccaacccctatcttgcctttcacctctaaactgcccttaggcattcctgggcttgggccaagctaactttgggagacatttagtttatagtttaaacgataatagcccatctcccaaactaaaccgcctttgtaaagataatgaaagagcactaggttaggaagatgagaagtgcctacattctgctaaggtggagctgtaaccgattatcagtcattattccagaggccacaagattcgcaacttctccggttactcctgcaaataacatcactcttggagagtccaagattgactttttgagacaagttttcaggttttttggcatttcttactaccaatggctggggcatgggggtgcgggtggcaccccagtcctgtggccccacccagaagcggactcagcaccccaggacaattttccacacccctgggattgcatccccagccagtcagcagcacccatttcctggcccgccaaactatccttgaaaaactccagcctcagaatcttcagggaggccgatttgagtacaaataaaactcccgtgtccagccagctctgagaaatctggctgtctccgggcagcgggcaaggtgaacccacggggtggttacatggggacccaggctgtctcttgtatgggggacttatgcaggcccagcccctccccttctccttcccaccctctgagcggcctccaggacgcactcgcgtgaggaaacccggcccgcgtgtccgagttctgtccacgccttctgccaacagctgtcctttgctcttcggggctcctgggaccgcgggaaggggccggggttgcctggggaaggggtgggtgcacctgtgtgcatggtttaggggtctggagtctttgaggtcggtgggtgtttgtgtctctgtgtgtctgtgaatctgtctcgtctgtggttccaggcctggtggcgctgcagaccccaagaggccgccctccgccttcagacagctcccgccgcctcccggcgcctgggaggagacggtgggaaaatcgcggcggcgacgagagcccggcctgctctttccgttccgctcccgcagggggcgccagcgctccgtggagagcggctgcggccccagagaccacgctcgggccgcctgacgcccagagcccccaggaaggggaaactgagacccagggaggagaagggaggctactcagacctcctaaattctagtcccaaattccacagcaccaagcttgtccctagacttaggaaatgcagtgggagcgctgttctctacctgggctgcacaggctggctcagaggtgggggattggactcaatgacctctcagtcccctcagagaccctcgccagctgtggggaggtccgccagctcagggatgaggtctggagggtagggctggggggacttggccctctggaagttgctcactgtgagggctaggttgaggacccatttattcatctgtaaaatgggtgtgtagggaacaggcatgttcagttttctcccttgctttcggcttcatcctagcgcaggtcagaagcttaaggggagcctgggccagcgtcctgggcatcccatccttgcattctccagacatgaccacctccagaccctgctcattcctagacctgcctactggaccatgggatggtgatcgcgcctacagcatccttacctaagcagcccgactcaaaacgatgaattggaccaatcagttattgccctcctgttcttctagaactgtatacagacacccattgtccgtggccttgtgctgggtgccggggagagagcagtaaacagaaaagtgaggctctgcccctagagaccccaccgtccagagagaggaggcagcgtgccaagcaagtaaacaacaaaccaacaaacaattacaaagtcctgtgaaggaaaccaagaaagggcagacagaaaggacgactgaggagggggaggctgctcttagctgcagctgtcaggggagttccctccaatgaggcagcatttaaaccaggagctgaaagatgagttggagtcagccatgcagaggcgaggtcagtggaaagggtgagctagggcaaggaaaacaatcagactcatccttttataagatcctcacgctgctgggtggagagtgggcctgggcagggcgtgaagggcagtcagaaggccagagaggacgccgttgccatgaatcaggggacagctgctggtggctcagaccaaggtggtggctgtggaggtggtggattctggatgtattttaaaataggattggcggggcgtggtggctcatgcctgtaatcccagcactttgggaggtggaggtgggtggatcaactgaggtcaggaattcgagaccagcctggccaacatggtgaaaccctgcctctactaaaaatacaaaaatcagccaggcatcgtggcatggatctgtattctcagctactcgagaggctgaggcaggagaatcgcttaaacccatgaggcagaggttgcagtgagccaggatcatgccactgtactccagcctgggcaacagagtgaaactgtgtctcaaaaaaataaaaataaataaataaaaaaaatagggtttatttaatttatttatcaaatcaaatcaaattgccttgaagccttgggtagttggaagtgcctttttccaaggtggggacaggtgtgtgaaacgcgggatgggctgtaagggatcccaggacggaatccagccctccctacgtattccctgtctttgcaggtaggttgtggttctgaactcaaggattaaggcttccaaacttggtccagcttcagtattgcctgggagcttcggtcaatatgattctcaggtcccagatcttttgacacagaagctctcaggtggcccctatgtgggagtccctgccccagagcccagcagttgttttcccactaggactgtggtgactcccgtcttcctcttctaggtggccagacccaggtgagggaagaggcagtggtgggagagtttggagggagcgccaagagacacacatgagcagaggctgctggagagtcagagatgtcgagaaatgccagggaaaaacaagctaccttttaattttgacctcatttctaaatgatcacagctaccaaggaagatattaatttgcctcctgggaagtggctgggggaagcaccaagagaaactggcaagcaaaacaggacccagaggctgaagtccttgcaccgagcacttgccaaggtggaggtggggagggctgggactctgagggccctttgggtccctagaatgatgctaagataagtcaggcagctgctggcagtccagttcattctgaatccatcccacgagaggggctcaaatggccaaaatgtgtcccttgccttgacaggcttgggaggttcatggaacattctctcactggccctcttcacctgggggtcatcctgtaggtctccccacaagcatcacttcttcaggggaggcctcccttgctccccattactgggtcatatccccagtgtgaacacccacttggccttctctttcctcccgtgggcatgttcaatgcatgatgcactttcatccagcaaggcagacctgctgtctccttttacaggtgaaggcgctaaggttcagagagtttaagcagtttgcccaaggtcacacagcttgcacatggcctggaacttctgtggctgccacagatacagaaaacattgcccccaagtcctttgttataactgaacaccacttaacaacagaaaactatggctacccaaaaggatcagacgaaacctctcaaaggaccaaataaatatcagtgctaggtccaggcacgacgtagggattatgttttggacgccacatccacttgacgacagggcccccagaggccaacctttgctgaacggagccctccccttccccaaagtcagctgtttctctgtccctggaaatgcctctgaaatgtcaattgtgagccacccccacctccccttcctcctacgagccatgtagcagctcaaatatattatacatattaaaagaatatattctctggcagccctgaaggggataatgaaacctatatatatatatctatatatttatacacaatggattggctcgaaatgctctgaatatccctccagctatggcaaccctttgaaatatgacactcgaacaacgcctcccccactggcggctggcgggagacattaaagatttaaaaaaagggaaggaaggaaggagacgaaggagaagaaaaaggaggcagctgctgttgcctttggctgtgcagcaacaaactgtgtttaaatattaaaaccacccatcacccggcccagctgtctgcccccttcagtggtctgggttcttgccagggtctcctgtggctcagaatggctggtggggggggggtgccatgcagatctaaccccccaaccctggggatgtggcagaggctgggaggttggagggggaggctctgcttctgatctcagattctgggcttgtctaggctcggctgggaaaagggatctgatgtgggagtggggttggggggcgtctgctgggtttgaggcagaagataagggtttggatcctgactgctgattaggcgctgtgtgaacttgaccttggggaaatcaccccccagctcaagctgcaataacctcgtctatactgtaagagatttaaacttgatcgtgggacttgaggactctatgaatcctcacaaattacatgcaaaattggggtgaggtcaagggagtcacagtctcgctggagtgactggcccccctctgagtgttcagaccatgatttccatctcaatgctggtattttaggtctctgggtagggcctgatttcctctgcatcctggttcctgcaggagaggcactttgtaagtgtttgttaatgatcagagatgggaaggtacaccttgttccaacactgtaattaaaggtgaccagaagtggcatgggttatcttgcaaggtggtgagctccctgccactgaaggaattcaaacagaggctgaatgaactctttttggggatgctgtaagggatacttaagcatttgacagggtttgactgtgagatcccttctgattccaaatttcttataattttaattttttaaaacttttaagttcagggttgcttgttacgtggtttgttctaaaggtaaacttgtgtcacagggatttgttgtactgattatttcatcacccgggtattaaacccgtgcccactagttatttctcccgatcctctccctcctcccaacctccaccctctggtaagcaccagtgtcttttactccccttgatgtgtccatgtgttctcatcatttatctcccgcttataattgagaacatggggtatttggttttctgttcctatgttagtttgctaaggataatgacctctagctccatccatgttcctgcaaaggacatgatctcattctttttttacggctgcatagtattccatggtgtatatgtaccacgttttctttatccagtctactgttggtgggcagataattttaatttgttatgattgaaggctacacagaacttcaactatgactgaggagaggaagagagcagtttggggtttctgtatattctgccagagtgtaaagtggcagacgtgtggctttgccttccaggtgcctctcatagtggtgtggagtgattccagggtttaaatacacatattttactctgccatagctcctaaactcacaccaaacacttttgatcatctgctccactgaaaacgcagggattttttcctttcctttcctttcctttctttttccttttctttttgagataaggtctcctgtcacccaggctggattgcagcaatgcaatcacggctcattacagtctcaacttcccgggctcaggtgatcctcccacctcagcctccctagtagctgggaccacaggtgaatgccaccatgcccggcaaatttttgtattttttgtagagatggggttttgccatgttgcccaagctgttctcgatctcctgggctaaagtgatctgcctgccttggcctcccaaggtgctagacttacaggtgtgagccaccatgcctggctggatttgcttcgtccctggaggaaaagctgactgagctggactcactgacagctgaatggtttccagcatggaatgtctctacaggatttgcaagggaaattttgtcttttttaaaaattattttttcattattctgggtacacaataggtgtaatatatttacggggtacatgtgatgttttgatgcaggcatacaatgtgtaataatcacatcagggttattgaggtatctgtcacctcaaccatttattatttctttgtgtaaggaatattccgtttctacttttttagttattttaaaatatacgataaattatttttgactatagtcttcctagtgtgctactagatcttatttgagacagagtccctctctgtcgcccaggctggagtgcagtggtgcgatcttggctcactgcaacctctgcctcccaggttcaagcaattctcctgccttagcttcccgttatttcttctatctatgtttttgtacccattaaccaacttcacttcccctgcctccctgcaacccttcccagcctctggtaactgtcactcttctctctgtctctgtaagttcaattgttttcatttttagctcccataaatgagtgagaacatgcaaagtttgtctttctgtgcctggcttatttcacttaacataatgtcgttcagttctatccatgttgttgcaaatgacaggattttattctttctttatggcagaataatattcctttgcatatatgtactggcaaggggcattttgactacaccagactgggatatttgctcacccattaactctagaaccaaatccctgaataagatgtgacttccctaattgggatgctccaattctaacagccaggagtcttaagggttcaggattccagaatctaaagtttctataacttgaagattccgaaagtcaatatttctaagactctataagtcaagaaatctttaagaggtagttcaagataagactttctatggggaatgtatgttaggggtggaagtgctaaggaataaatgtgaaacttttttgctttttttcaatgtgtgaaccacctacccatagaaaataaatctataaaaagatcatctgcaaaagcaaagtgatttcacttaacttagaaaaatacaaaatattttctctgttaaaaggactgaagctcaggtgggagtttgataaagggatggagtctgctgcatgctagtaaaccacctctccaaagaatgctggggtctgtagcatttgccagttttcatggtgtaaatacttccactgcaatcgatttcaagttgccagcagtttaacaattggttctcaaagttcccgaaaatctaacaatcgcccttttatgacctagcaaaagctggctggccaggcttctgcaatagaacctggaagagtcagaggggttgtggctttgaggacaattgttcaagtgagaagagggctgtgcagatctcaagatgacatcgggatcctgatgtgaagttttcctgcttctggaggagggaagcagagggctgttttgcctcctctgggccagggatgcatggaatggcagaggtgggggctcccagctatggtgactgggagggcaggtaagtgatgggactgattaggaagagccgcaactgtcccttcacccggcccatccttcagtggaggtggacattcgcctatttcctcacactttttttttttttttttttgacagaatctcgctctgtcacccaggctggagtgcagtggtgtgatcacgactcactgcaacctccacctcccgggttcacacaattctccagcctcagcctcccgagtcactgggattacaggtgtgtgccactgcacctggctaatttttgtatttctttaatagagacgggtttcaccatgttggccaggctggtctggaattcctgacctcaggtgatccatctgccttggcctcccaaagtgctgggattacaggcttgagccatcacacccggccccctcacgcagtgattccatgaaaatttatgcagagcagagatcatgatgctcattttgctgatgagaaaattaagacccagacaggaaaaggtatttgtttccagtcacatagttgccaggaaataaaatgatagtagctcaaatagattgagcatttactctgagccagatctatgctaaatagcttgacttgttgcttaggtcggggtccctggaagcagatcctgagacaaagtcccctgtgcaagagatttatttcaaaggtgtgcccaggtaagggggagaggggctgcagaacagggaaggggaggaagccaggcaagggtgtgagttcagaccatgtcctagcctcagcctaatggggtgtgggtctggagcaccccagaatttgtcccagctggaagcaaaagatccgggctttcatactcctctgttagtcattggctgggggccattcttgggacacgttgactcccaggcccccaggtcaagcctccgaataaggatttctttcttttctttttctttctttctttctttctttctttctttctttctttctttctttctttctttctttctttcttctttctttctttctttctttttctctctctttctttctctctttcttctctctctctccttctttcctgtctctctctctctcccttccttccttcccctttctttctttctttctttctttctttctttctttctttctctctctctctctctctctttttctttcttttttttttttgacacagtttcactctgtcacccaggttggagtgcagtggtgcaatctcagctcactgcaacctctgcctcccaggttcaagtgattctcctgcctcagcctcccgagtagctgggattacaggtgcacgccaccacaccctgctaatttttgtattactaatagagatggggtttcactatattggccaggctggtctcgaactcctgacctcaagtgatccacccgtctcggcctcccaaagtgctgagattacaggcgtgagccaacgtgcccggcctgaataaggatttcttattagcatccaaacacatcggagctgggcatcaacagtgtccactcgcttgtattaactcaattattcctcccagcaatgctaagtggtattattatcacccccactttgtagatggggaaaatgaggcacagagagatggagccacctgcccagcatcacacagctagtgactgtcagagctgggcggagcctcggccaaaccgaggcctgtacacagttcccattgttctcttctcggaggaagggacgttggtgactggaggagcaagagaagatggccagaggcaggggaagctgtcaggaccagggacagcaactctcagaagaaaggggaaagagaggcgaggctttaagagacctgtttgggctgggtgcagtggctcacgcctgtaatctcagcattttgggagactgagtcaggcggatcacttgaggtcaggagttcgagaccagcctggctaacatggtgaaaccccgtctctactaaaaatacaaaaattagctgagtgtggtggtaggcacctgtaattacagttacttgggaggctgaggcagaagaatcgcttgaacccaagaggcagaggttgcagtgagctcagatcgcaccactgcactctagcctgagtgacaaagtgagactccgtctccgaaaaagagagacctgtttggacagaggaaggtaaatgagacagagaaggagtagggaggtgggggtatggagaagaggctcacacagcgctctcttcccctcccccaaacatcctagcccagccctctgagccttagtctttttctctgtaaaatggggtgaatagaggtacctgttccctcatagtgctgttgagagaattaaataagaaagtgcttgtcaagtgcatgttctgggtggcccactgtgaggactgacagccacagctcttccctctgcctggccaagaggcaccagctggggtgctagatgtgagctgagcctctggcctaggggacgaggggctgctgtagggctgagtgtatgctgggggagagggctggggtgagctgaggtggggcagtggatttgcccccgagagcctgaggggagccatcagtgtgctttcagccgggaatgtcgtgactgcagtgtggggtgtgtgctgggttcagaggggcagcagagagatgacagggtggggagatggttgaggttgggcgatgctaacgtccaggcaggtggtgcggctgggctggcacagtgggtgacacacatggcttgtgggtgtgtagcatagtgtgccctgtgcatgggcctgcatgggcacgtgtgtgtggtctatctgagtgtgtgtcatgagtgtctgtaggggcatctgtgtgtctgtgtaatggtgcatgtgtgtctgggagtgaagttgagggcatgcattgtactagtatgcctaccatacttgagcgtgtttgcaaatgtgtgtgggtgtgtgtctggcccaaacctggcaggctgcggtggcagaggggctgaaggcctggcagtggcctgatgggcagctttggaactccttccacccctctctcacaggagctgactcccagaccgaggaggcctgctggcactgagtccgtcctgtatctagaaggactgccatggccctggcagtgggggagggctcttaggacctggggcaggctggggagtcaggactgagaagggagtggggtgggtgaaggctgggtgcagacctaggagagggccacctccctggacctctgtttctgtgtctgtgaagtgggccttgaagagtggccccaaaagatacagctgggcagatccaccaatgtctgctggcttgaaccccaccttacacagaggcccaaactgggcaataacttgatgagtgttgcccagcaaatcagtggctacttggagggcagactccggcttcccgtggccatctgagtcagggccctggcagggatcctggaacaccagcactgggcctcccttctccaggcagcacccagcacaatattccagcctgggggacaggactgatagatgctgtcccctcatgttctggcagatgcccaggcatgacttcaaagctggaaacaacatgggaatcccaccatcagagctcacagcctctccattctgcaggatttcaaggccaaggaatagcttttctgcctgtcattccgccattaaggagtcagtcatttggctatgtaaatctttcaaatgtttcttttttaaaatgtaggtaatttcagaaagtattttactttccaccttggttgtcaattaagattgggaccggggagttgagttggactctttatggggccaggttactgggggagaggtcctgaagtcaaacaaggaccttgtacttgcagtgatgagccctgctttgagagaaatgccagcaccaccagccaataagatggagagagggaggagggtggagtatgtaaactgaggcacaaaagctggggccaaagcaaacactttataattgttattattattattatttgagatgaagtttagctcttgttgcccaggctgggtgcagtggcacaatcttggctcagtgcaatctccccctcccgggttcaagtgattctcctgcctcagcctcccaaaaagctgggattacaagtgtctgccaccacaccagctaattttttgtatatttagtagaaatggggctttatcatgttgaccaggctggtcttgaactcctgacctcaggtgatccacccatcttggcctcccaaagtgctgggattacaggcatgagccaccacgcctggctgcaaacaccttattaacagataccttagttgaagttaaacaccctagttaatagccagcatcttcattaactgttaacaccctagttaactgcaaacaccctacttaacaaaaagcttacttgttgaacactgtagtatatagttaacagtgaacactctagttaacagcaaacattgtttttaacagttaacaccctggtaaactgtggacatgctacttaacacacacttttgttgacagtgaacatgttagtccacagtgaacacatcctagttaacaggtaacaccttcattaacagttagcaccctacccaacaacaagccctttagctgacagtgggtctttggcagaaaattaggttgaggcactcactgagggttttgggagagggaggaagctcagcctctggctctgtccttaggcctggcccaccagccccacagcgctacctccatgcagtagtgccctctggcttacagggggaaacaggaaaccacagctgggatgtgaattctcagcctgagtgccctgtgcttccctggaggggaactcaagttcctcttttgtgtcagagatgaaagtctgagctacagtaggtggggagcttggagtgatttgtgtgtctctctttcctctcaccctcccttcctccttgctcttggtctcactgttagcccccagctggctgtgtctggggctcccttttctcctctaccttgcactccagctgaccatctcgtttctggatccttctctttgctcatcatctttcctcaaactctctctctctctttctttttttttcttttgagacagagcctcattctgtcacccagactggagtgcagtggcacaatctcagctcactgcagcctctgcctcctgggttcaagtgattctcatgcctcagcctcctgagtagctgggactacacgtgtgcaccaccacgcccggctaatttttgtatttttagtagagatggggtttcgccatgttggtcaggctggtctcaaactcctggcctcaggtgatccacctgcctcggcctcccagagtgttgggtgtgagccactgcactgggtcctcaaactcttcctctgactttgtcagtttcttccccctactctcgtctttcccactccttgtctctgtctctccctccctccttctcttatcatcctccagatctctgcccaagcaccaccttttccaagaagccctccctgaccctccaggcctaacttatgtccccgtgtcctcctggaaaccatgctccttgccttcagagcccccacttctacttgcagtgagtaattacaaaccagagtctgtctccccaccagcatgtgagttccttgtttgccttgctcactgccatatcctcagtgcctggcatacagtgagtgcttaatagatgttcctggtgtaattgcctttctctctgccccttctagtctctctgctttgtcctagctgcccggatgacctagccagaggcttctccacttgtctctcatcctgctcttcacttccctgtctccacagctcttggtggcccagggtgggccttggccttcagcctgctgacccaggaccctcactccttccatagtggggaccagtgcctgtctgagccccatcatgatcccactgggaggtacttgttataactggttagaggaatgaatgatacaaagagaaaggatttgccatttcaatcccagccatctctgcttgacataccttgtgaccctgcgcaagtcacctcatcttttgagtttctctttctccatctgtgaaactgactggagatcagcaaagacattccatgggaacctgctttgtaacccatgaagtgccttgttggtacctgtgactaccagatgttagtataacgttttccttccctctctgggcactaagacacatgaagttcaatttgcagcccccaggagcccaggctggggtgcttggggtgctggggctcttcaatgatggcaactaggggaaggacaaagttggtgtttaaaaccaaattcattaatgtgtgtatcattgagcagggatcctcaacccccaggccacatagcaggaggtgagcgggggacaagcaagcaaagcttcatctgtatttacagctgctccccattgctcacattactgcctgagctccacctcctgtcagatcagtggtggcattagattctcacaggagggcgaaccctattgtgaactgtgcatgcgagggatctaggttgcacactccttatgagaatctaacgcctgatgatctgtcactgtctcccatcacccccagatgggaccatctagttgtaggaaaacaagctcagggctcttactgattctacattatggtgagttgtataattatttcattctatattacaatgtgatagaaatagagtgcacgataaatgtaatgtgctttaatcatccgggaatcatcctgaaaccttccttcccccaaccccacaccggtccttggaaaaattgtcttccatgaaagctgtcccttgtgccacaaagattggggaccactgttactgagcacctactatgtgccaggcactgtttagggctctagggctatatcagcaaacaaattagaactctgctcctagttcctaacgcagtcattgcaccatccatgacttcaacagatatgcattgagcacctactgtgtgctgggcacagcggaggccttgggatggagaagtgaatgagacctgccctcacaagtgcatatttggtgctccatctctgttcagtgcttagtgcctttccacgctccaatattttacctttggcctgcccaactaaagtgatgagagcaattgcagattaggtgacttgctgaaggtcacgtgtgctggaaattggaagagctgaatcaaaactcagatctgtttgagtctagggccctaactctttgggtatcttgggttgtatctatcctctgtttacaagtctctctctctctcttttttttttttgagatggagtctcgctctgttgcccaggctggagtgtagtggcaccatctcggctcactgcaacttccgccttccaggtgattccaagtgattctcctgcctcagcttcccaagtcgctgagattacaggcatgtgccaccaagcctaagttttgtatttttcgtggagacggggtttcaccatgttggccaggctggtctcaaacttctgacctcaggtgatccatctggcttggcctcccaaagtgctaggattacaggcatgagccatcgcacctggccccaagtctcattttccctgtctgtaccctgagtaaccttggagaccatccagcgacgtggatcagtgagaggagtgttggggccagtgaagccggggaaggggtgcccaaactaacatcccttctccaccagcagccaggccagctcagcctctgtgcaactttccctgcttctgagtctggaggtggttcttattattggctccaaatgacttttgcatccatttatttgctgcattttgattttgcattcaatctctggtccattcatggtgtctgcgctacctaggggatgcaaaattgaggcagccaggagtgcagtttggacacgcctgacagccaccactccttggagggaggaacgcttgactgactccacagtggaaaggctgatgagcaggaggctgccccgccactgccccctactccagccagaatctgccagatgggcttcccaccccgaagctggcttctccactcccccggctccaacacacatatctcagctggagagatggccactgggaacccagccagtacctggggcctgtaagcagggcaggcactagacttcataaaggatttgaaatccttcagggctatgcaggagcatttgggcagagagagcagaatatgagtcccaacttggtcccgccaacctctcttcttcattcacctttagtggtgttgttttgtttcattttgttttgaggtggagtctcactctcttacccaggctggagtgcagtggtgtgatcttggctcactgcaacctccaccttctgggttcaagtgattcttctgcctcagccttccgagtagctgggactacaggcatgcaccaccacacctggctaatttttgtatttttagtagagacagggtttggccatgttggccaggctgatctcgaactcctgacttcaggtgatccacacaccttggcctcccaaagtgctgggattacaggtgtgagccactgagcccaacctagtggggtctttctaatagacgatttgacctggcccctctcctgctcaagacccttccattgctccccactcccctcaggcttgggtacaaatttctggccttccaagccctatccacaccagccccctctctcagttcttcctaagctccagcatctcccagtggctcctatttccccatgttcacaccttggcagaggctgttccctttgcccaaaccatttgccacattgtcctttaggcaaactcctagacactctctgcaaattgtgaggacaccagctagccctctgcaccaggtattgcacttcacactttatatgccttattcacttggcactcacagcccctctaagagaaattcccatttgcagatctcctgaagtcagcagaggctcagagaagtcaagcaacttgccctgggtcacacagtaggatggcagggcaggcagtgcaactccagagtctatgctcctaacctcagagcctcagaaccagctcagagcccacctcctcagagctctcccagccacacaaacgccagcctcctccatcccacctcactcctgctctcagcagagagacctccctcctcatctggggctcccatggacccaggacgtttttggtgattacatttccacactgcctttattccctcatgtctggctctgtcatgagatgctgaggctggtcaaggactgtggctgtgggttcccagttcccagcataaggctaggcaaaaagggtaaatgtaactaagattggtctcatcaggagccccgcagagatgacagaaggagcaaatgaagtaagagctgtaaacaggctgggtgcaggggctcatgcctgtaatcccatcactttggaaggtcgaagtgggaggatcactgagcccaggagaccagcttgggcaacatagtgagacccactccctcaacaaaaaataaaaacttaaccgggtgtggtggcatgttcctatagtcccagctacttgggaggctggggtgggagggtcgcttgagcccaggaggtcgaggctgtggtgagctgagatcgtgccactgctctcagcctgggcgagaccctgtctcaaacaagcaacaaacaaaaaaccaagctgtaaacagaccttgtgtggcttttgtgtccaggaggtggggaggtgttattatatgcagaggtgacaggctgcacagcaatgatctgcagtgtctacaccatctttcctccacaaagtcaagatggggcatcatctcctaaagggtctctgaaagcacaccaccattagctggttcagtatcactccatttccccctgccccctaacccccagccttggggagactgggggagaaggagggtgcttctggggaggaggggtctctgattgaagtcatatatcacagtggcagctgaggcagagagatgggagcgatttttcttcatggtttgcagacaaatgtggtggacagaaaattgatggcaacctttggcagcgagagacctggggcctagggagtggccatgcctgcccgggcaatggggatcacaggcaaccactccccgcggacccccggctcccacctgaatctattgtcctgggcagaggcaagggggcagcccagacttggggaagacgcattgagggggcgtgggaggagggtatgtgtgaggtggcctgggttagtgctgactgtgtgaccagggcaaagtcaggccctctgtaggcctcagtttccccgctggtacagtgagttgtcaaggccagcagaatcttggggagggatgtaggtgggctttttcccatatctcttatctttagctgtctcgtagggtctgggagagtcaggaaaatggacgtaactctggcagaagtctcaggagccccaaagctacacatttcctgcttccaaattatccttgaacctagaggtttggggagcttagaatcttagaacctggaaagcttgttttcctagaaacccagattcctcagctctgaatgcattcagtgtaactctccacccacaccccaggtgtgcaagaaatgtagcttcctttgtttttaaataatgcatcgaacttgcatttcaagctccgttctgccaggatggaagaaacccaggcggaccgggcttccctctttcatggggctggatgatacttgggggactgccacaggtcatgggagaggagaggtgactcctcagttgtctgcctatcaagacatgatgccccttctgaccctcagtggctggtcaccatggcatgcaactgtccacaaggctgctctggtcttttgagtctttctgatgctcccacaccatgctgggcacaggggtctctgctgggccatatcagacctgtggacccagactggggctcagcctggagtagggcacaggccaccgttgctctcaagtcttctagatgtggctgtggattctgacatcaccctcaggcctggagatggggtaggactcctttctcagaggcctgcaggttcaagggctccgggtttcccttcgactcctttcctgaaacccagctgaggggactgcactggggatcctaggggtgactgggagctgggtcacatctgttagagaaaaaattattcccacctggtcaacgtggcaaaaccctgtctctactaaaaattagctgggtgtggtggcacatgcctgtaatcccagctacttgggaggctgaggctggagaatcacttgaacctggcaggcagaggttgcagtgagccgagattgtgccactgcattgcagcctgggagacagagctatctaaacaaacaaacaaaaaacaaaacaaaacaacaagaaaaacagaaacatttattcaacgacacttgttgaagagtggtaaggtggactttttattcaggaccatggcaacagggaccattgcaacgggaatttgcggtgggggagaaagaacgggctcaactccaaatacagcatgggcaagtgggatttatggctaaggagcagtgcaggggtccaaggatggaaaatgactgagaggaagcatcaggggtgagggagaatctgactcaactgatctaacaggattcttgctgaagacaggccagggggatcaggcataatctgggccgtggtggagggtgaacagcctgattagatatgaaggatgatcagatattgaggatagggggttcttgctaaactgacttagggttcttgctaaaactggattttgtaagaaagtatgcagatgggcttagcagagtttcgggagcctgactaaagtttggtcaagtgaagaatctctgctactctctagagttactctcaaaaaaataaaaataaaaataaataaaaataaacatgatgggtagagaggctacacaccctgttccctgagagcatttgctttttttttttttttttttttgagatggagtcttgctctgtcacgcaggctggagtgcagtggtgcaatcttggctcaccgcaacctctgcctcctgggttcaagcaattctgtcatctcagcctcccgaatagctgggattacaggtgcgtgccaccacatctggctaattttttttttttttgtatttttagtagagatggagtttcaccatgttgaccaggctggtcttgaattcctgacctcaagcgatctgcctgccttggcctcccaaagtgctgagattacaggcgtgagccaccactcccggccaagcattttcttttcaggggttgggaggagaaagagaaaggaattgggttggtgagtggtatatacaggggtattcaattgtatctgtaacattttatttatatatttttattagttataaattatatataaatatacatatacatgtgtttctgtatgtaagttgtttataagtttttaaaagagaagcatggcctctgtatccttccgaagctgacttctctcccttcctattactttgctacgattcacatttgttgttgcttgtggctgttgttcattcattttgactgctggatagcattccattgtgtaaggatatcggaggatgcaagtccccaagacctccccgacactgctggtggagtgcaaattgatgcaaccacattggaaaacaatttggcagtatctcatggaggtgaatattcagcaattccactcccaggtaaatacccaagagaaactcttgcacacacacagcagcagacatgacaagaatgcttataacagttctgtccacaataacaaaaacctggaaacaacccaaatgctcatcaacccgagaaggaataaatacgcttgtttgctgacaaaatacattttaaaaaataaataaaaggtaagaactgaagcaagtcaggcataattctaatataagttaaaactggatcatgggcacattggtctttattaatttattctttgaatgtctgaagtaattcataacaaaaagaaatcatgttttgaaaaatcttgaattgtagcatcttggacttagaaggcctgtgatctttggtgtcagaaggggttagggattagctagtcatgtctgtgacatccgggagcttacccagcgagcttccagcctttgcctgtgtactctctgcagtggagtgacccagagtgcatgataagattaactccaggggtggggtaggtcaagatacaaacattactctcatctgcagatattgttcataaggaagggaaatgacctagaatgacacagaaagggctgataacaaatcagggtgaccaaggatgacacctcccccccgccaactccacgaggggctgacaaaactgtgccctatcctagagataggcttccggaatgaccaggatgggtcagcatagctagaaaagggggtcccagagcagaatgtggtgcatgggtctgcctgatagagggaagctggtgggcccaggccatcaggccagaaaactgcatcttcctcatcccctcccctccagaatcttgtcctattcaccaagtccccttatgttttataattcagtcccccagcccttctgggacgtctgtactacatttctctttaacttgaacagcatgctgccggatgcatgcatgcccgaacacatggaccctgtatttacatatgcacatgcctagaccggtgtgcacatggggtcctgaggagttagtagctgtggacatgcgtgtagctccccctggaccaagtccatgccacaccatcactgctgccagatgactccccagcctcttcttggcttctctgccttccatctcatcccctccaagctccccattgcaaccaggggttggggagactcctgaaatccagagctgaccctgccactccacagcatggatgaatgaatgtgtgttacaggcacatttctatgcttatgcatgtgggctcctggatcctgtgtgtgcacatggagatgtgtatgtaccctatttcatttttagatttattttattttttgatttggtaatacctggacatgataaaagcttcacacaattaaaaaagatacataagaaaaatccatgtcccagtggctttttgaatggtggaggaaggacttccaaaaatctgctccttcataaaagcaatgaaaatactggagaaactctccaatatagttttttgaaacactggaaattaaaagcttacattaatctgaggagtgttgattttaaaatagctgaatcttggtaagaccatgagctttatgatgttttgttttcatttttctaagacagggtgttgctctgtcacccaggctagagtgcagtggcatgatcatggcacggcagccataacctcttgggctcaagcaatcctcccacctcccagtctcctgagtagctggcaccacaggcatccacctccatgatgttttaacctgccttaatcccatttctctctccctatctctgtgatatttttgaaaacagtggtatttagttttctacctgtttcttgggatatagctcctaaaacttttggaatctccagagtaattagtgtcttttgtatgctaatgacatgactgatgaggtaggtggggggccctagacagcttcaggatgggatctggtcactggaccagtctgagaaacagaagtgaactctagagcctcagagacctgtaggataccaccaagtgtaccaacatgtgcaaaatggaagtctcagaaagatgggagagagagatgaggaagaaagaatatttgaagaaataatgaccaaaacctccacaagtttagtcaacaaacattaatctgcacatccaagaagtgcgacaaactccaagaaggatatacttaaaggggtctgtatctaggcacttcattgtcaaactgttgaaagcccaaagcagagagaatcttgaaagtctcaagataaaagtgatttaccaggtgcaagcagtcctcaagaagattaacagctgactttatatgagaaaccacgaagaccagaaagcagtgggatgaatatttgaagtgctgaaagaaagactactaagtaagaattctttatccagcaaattattcttcaaaatggggaattaagacattcctagatttaaaatattggagaatctattactagaaggcttgccttacaagaaatactaaagggagtcctttaggttgaaatgaaagaacagtaactggaatctgcatgaagaaacaacagttatagaagtaaagtatagaaataaggaggaacgataactacataggtagatatatggctacataaatgtaattttgtttataacttttttcttcaatcttatttaaaagataactgcacaaagcaataattataaagctatgttgatgggcttataatgtaatgtatagagatgtaatttgtatgacaacaatagcataaaagaggagggaggaaatgaaagtatattggagcaatgttttagtatactatggaaattatattggtattgaaccaaattagattattttaagttaatatattgattgtaatctacatggaagccactaagaaaataactcaaaaaataaaagaaacaaaacaagataataaaaatggtatactagtagccaggcatggtggctcacacctgtaatcccagtactctgggaggctgaagtgggtggatcacttgaggtcaggcattcaagaccagcctggccaacatggtgaaaccccgtctctactaaaaatacaaaaattagccagacatggtggcgggcacctgtaatcccagctactcaggagactgaggcatgagaatcacttgaacccaggaggtggaggttgcagtgagccaaggttgtgccattgcactctagcctgggcaacagaccaacattctgtctcaaaaaaaaaaaaaaaaaaaaggtatactagaaattatctgtttaacactaaagaaggtagtattggaggtatagaggaacaaaaaaatgtaagacatacacatggcaaagtaaaatggcagacacgaattctaccttatcagttaagaaaaaaaggaaaaatacataacacgaaaaccataaccaaaagagttctggagaggctatgctaacattagacacagtaatctttaagataaagattaatactagagacaaaaaaggatgttttataatgataaaatggtcaatccatcaggtatacataacagctataaacacatatgcatctaacaataaagctccaaaatacatgaagcaaaaactgacagaattgaaggcagaaatagacaattcaacaataatagatggaaactttaatattctacttttaataatgaatacgatacctatgcagaagatcaacaaggaaatgaaagacctgaacaatattaaaaactaacttgacctaacagacacctatggaatattcctctcaacagcagcatttttcttaagtatgcatagatcattctctaaaatagataatatgttaggtcacagaactagtctcatatgttcaaaaggatttaaatcacacaaaatatgttttctgaccacataaaatgaaattaattataaaaacataatgaaagaactttgggaaagcactttccaaaaaaatgtggaaatataaacaacacactactaactagccaattagtcaaaaaagaaataacaaggaaaactagaaaatattttgagatgaatgaaaatgaagacacaacataccacaacttatgggatgttgcttaggcagtgcttagaggaaagtttacagctacaatcacctatattaaaataaataaagatctcgaatcagtcacctaaacttcctccataaagaaattagaaaaagaggggcaaactaaatccacagtaagcagagacaattacataataaaaattaaagaggaaataagtgaatgtaccactttatacctagtaggatgggtataataatgaaaaaaggacaataacaggtgttacttggcaaggatttggagaaattgaaaccctcatacattaatgatgggaatataaaatggaaacattttgtcagtttctcaaaaagttggacatagagttactataggacccagcaattttacttttaggtatacatccagtcaaatgaacctattttcaaacaaaaacttactaatgtatgtttatagctacattatttataatagccaaaaggtgtaagcaacccaaacatccattagctgatgaatgtgtaaacaaaatgtggtatatccatacaacagggtattattcagtcatgaaaagaaaggtgctacaacgtagatgacccttgaaaacattatgctaagtgaaagaagacacaaaaggccacacattgtatgattccatttatatgagagatctaaaataaggaactccatggagacaggaagtagattggtggttgcctagggctgggagcagggagaaatgaggtctaactgctaatgggtatggggtttctttttgaggtgttggaaatgttctggaattaaatagtgattgtacaactttgtgaatatactaaagacactgaatgcgcactttaaaaggatatattttatggcatatgaattatatctcaataaaactgtcataaaagtcaatgttctgccatgctattttcttcttgtgtatctttccagagatactctaggcatgtggcagcatatatatgtatatagtaaatatttctgttttttttttgtttgtttttgttttgttgagatggagtctcgctctctcgcccaggctggagtgcagtggtgtgatctcagctcactgcaatctcctcctcttggattcaagtgattctcccacctcagcctccagagtagttgggattacaggcatgtgccgcaacaacccagctaattttgtatttttagtagagatggggtttcaccatgttggccaggctggtctcgaactcctgaccttaagtagtctgcctgccttggcctcccaaagtgctgggattacaggtgtgagccaccgcgcccagcctataataaatatttcactaagtctgagattctattaatgaaaacagtattttatgtactaaaaaggaagaaaaaattaattttaattgtaaggcatatctcaatttcagggatgttaacatgtttaacatgtggctcttggaatcagtgcaaatattgatcacgtgttttggagagctcatgaatcaggatatatcctggatgtggtggatactttcagtgaacctcataggtccctttcagacagctcctgcacacagtaatggttttctgcgtctttatctaagggtgcttcctgggtgcgcttagcccagaaatgcagaattagtgcccaggagcaaccttcagtcagcaaggaacaggagatgtagagaaagccagccatggtggctcacgcctgtaatcccagcactttgggaagccgaggcgggcagatcacttgaggtcaggagtttgagaccagcctggccaacatggcgaaaccgtgtcactgctaaaatacaaaaaagaaaaaagaaaaagaaaacaaagaaaaaaaattagccgactgtggtggcacatgcctgtaatcccagctacttgggagactgaggcaggagaatcgcttgaacccgggaggtagaggttgcagtgagccaagatcttgacactgcactctggcctgggcgacagagcaagactccatctcaaaacaacaacaacaacaagaaaccaaccaggaatttgaaagaagcaccaacaacttccttgcccttcagagacaattctgaagtgcgtctcacatggtctttcagaggatgtctagcaggacggagccccagagaccccaggtgttaactcactcagaatacacatttgtctcctgtcatccttgctgagattcctaggatcccacataaactatttgcacccaaatcccagtcttagacttttcctttgagagaacccacatttaaatactgtgtgtatggctgtgaatggggtgtgcacatctgtgttcatgaatatatgggaatcaaagtatgaatacatgtgtatacccatgtttatgtgtgtctatggaagcatttctgtttggaaattggcatgaatgtgtatgtacacatgtgcatgtttgtgcatgaatttttttttttttttttttgagacagggtcttgctctgtcacctaggctggagtgccatggtatgaacacagctcactgcaggctcaaactcccgggctcaaatgatcctcctgcctcagcctcctgaatagctgggaacgcaggtgcctgtcaccccatccagctaaatttttttgatttttttgtagagatggggtttcaccatgttgcacaggctggtctagaacttctgggcccaagtgatcctcccgccttggcctctcaaagtgctgggattacaggcatgtgccaccacacccagcctttgtgcgtacttacactccagtgcagatgcatctatggaatgcttgtgtgtgccagtgtccatgcacatgtatatatttgtcatattgcaatagatgggctctcagacctgtttaagggtgtgtttgtgtgcctgcatgagccagacaggtcgaggaagcccgagaaagaccctcagagggtctctggtgcttaggagcctcttgttgggtggtgccactggggagatgggtggggaatgcattataatagtggcctgttgcatgccctctctttctctgcagatgcctgtctggagacaacctcatcaagtctggtctcagatgtgtgttctctctgatgggagacagctggagcggctgtcaggcctccctggcaatagcggtgcctgcggcagcacctgtcagcagcaccttaacgctgtcccagtgatggctgctgcgagtgggaaggtgacaggaggcagttgttcttggggtctgggaggctctttgctgcactgctccttgacccctctacatggaagggtgagccccagttcctgtacatcttctggaattgcagacctcctccccacgtcacctccagtggatttcctcgctggtcttgactctggctgatgccacccacacgcctccactccagctgttttcctaagacagcgtgtgatgccatgccgccctgtgtttcctggtccctctgcctcaaagactttggtttcccacctctgtctggtgaatttcccttttccaaggccagcttccaattccctttttcagacatcctgtcatgctgtgcccaggcagagccttcctccccaaacccacacagccctttgcacgtttctcttccattacacatattggttgccaggaaggagaattcaggtgaatgcctgcctctggctccctatcacaatgtttgagtctcaaggagggcgaccaggtggagttaggtgacctcaacccaaggggacaagtgtcagagttgggcagggtaaggtctggatcccaggaagataattctgttgttcttaaaataagaccccagctggtgatgaggagagagacctggaggacatagagaagcgcccagaaccctccttcattccaagaggagcggctgctgaccacagggcagagggccaaggttctaggaaaggggcacagaggtcaggaccggactgcagtccagcaagaactggagctcatgcttcagccttctgattgagctcaccagtcttaaaggagactggagctccctggacctaggttcaaatacccactcctccgcttatttgctgtgtgactgtgggcaagtcacttcacctatctgagccttggttgccatcagtgcaacatgaggtaaaactgctcaatttaaggagataatgttggggagggcctaacccagatatgggcacacagcaggcactggtctccaccttggggaaaaaaagtcacagctgcagccactggggccgcccgagacaagcttagggaaacattgccaactccggttccttattgctgggggtgaaggctcttggcagccccaggctgcacgtgacccttgaatcctttatgttcggtgtgacttttatcaagtcatttcacctctccacacctcagtttcctgccccataaactggagacactaataaaacccaccttatggggttgtttgtaagaaaggattgctattaattgccatagggaatgaattaattgcttgttaattgctatgaatgttaaaaatccattgttatacgagttaattgcttgaaagtgcccaccacagtgcctggcacatagtgagcattcagcgctcagcagcagctactgtcattgagacaacgtttgaacacctgctctgtgccgaacttcatgccaggcacccaaaacatcgagacagaggcacaacttgatccgtggatactctaagcccagttgtgggtggccgaggggaaggatggaagcacccaaatgcctcatggagagtacaaaacatcacaagacagagtcagaaaaggaggtgcaggagggcttcctggaagagaagacttttgaatgctgctttaatagctgggaatgtaacaacaatgtaactaatatttactgagaatttactctgtgccaggtactataggtgtttcacctatatggtcttatttaaagattctaacagcaataggtaatagggactattgcacccatttcatggaagaagaaagtgagacttaaagagattaagacacctgcccaagatcacccaagcctgagtttgaattttcagatacctgagctctgaagctccgcattcttcggcactccaggaagagggatgtaaaattgcagaattaggggagggtgggtacaagtgttaactgtgcaccagggtataccagatcctggctgggacattttgcttgcttgatcacatacaatccttactacaagccatatgaggtagacaatattatcacctccatcttgcagatgaggaaacaggctcaaagcagttgagcattttgtacaaggttaaacaattggcagtgggatctgactctaggcgctccaattcccaagcccatgttatttctgatactgtaggtgtgttctggaaacagaaaggaactgtccagtgtggctaaaggttagggtccttgcagagaacaaagtatggagcagttgggactgaatttcaaagggctagatgtccattcatacagtagacaatggggagccactgaagattgtggagtaggggcatggtggggccagagctgcaacttccaaagatgaatcatgtcacagcacctaagatggatgggatggggatgagagaggcagcaggagccccatcaggagacagcaccaggtgatggtgactttagatgacaagggatatggacaaactggcattttgctggggaaggaaaaccaagagctcagggatgagaaacagccaggggcagggccattagccttatcaaaaacctgattgctcttaacaaagtatttaatacaatttcctgctattagggccaaacctggactagcaagattattaattctaaagataatcattaagctgggcggaccgtattttaatatatggcaacaggcgagctattgtcattttttcccttctatcttgattgcaggtcacccaattagagctggcttcaagtgccccttcctggaggtagtgagataaggcttaatgtcctcaaacaagaactatcggctgtgactagaggcctataaatattaataaatctataattagtcctgtgaaaagggggatcaatccaggagaagtttccacccattaatactggaaatcacttttgctgggaaagcgggcttttctgttccaaatgccaggctgtttgaggaggatgcagctctgtcaggtttgccagactgattcacttctactcggccatagtcgtagtatcgtgggggcagtgagaatccctgcagggtctcacagggagaaaggcttcccagaggtggtgacgggagaaggttgtggcccccatgatcttgtctacaattattttaattttttacttaagtttttttttctttttttttgagatggagtctcgctctgttgcccaggctagagtgcagtggcgtgatctcagctcactgcagccctccacctcccgggttcaagtgattctcctgcctcagcctccctagtagctgggattataggtgctcaccatcccacccagctaacttttgtatttttagtagagatggggtttcaccaggttggccaggctggtcttgaactcctgacctcaggtgatccacctgcctcggcctcccaaagtgctgggattacaggtgtcagccactgcacctggtcgtaagttgctttgtttacttatttaaaaaaatttatgtattcatttattttcagacaggtgtcttgctgtattgcttaggctggttttgaactcccgggcgaagacagtcttcctgcctcagcctctgtagtagctggaattacaggcatataccatcaggcttggcaacataagttgttttattgttattgtataccagaatcctaataaagaaaaaatttcttattcttcatgtgaaatttgagtgggatagtgggctaagtgagggagctttgtagagctataaggtatccagagatatgaatacatgttattctattccaaaatttttattgaggtatagtacatactcagtaaaatatacacttctttaaatacaacctaatgacatttttttccttttttttctgagatggagtcttgctttgtcacccaggctggagtgcagtggtgtgatctcggctcattgcaacctccatctcctgggttcaagcaattctcttgcctcagcctcctgagtagttgggattacaggtgcgtgccaccacgcccagctaatattttgcttttttttttttttggtagagacggggtttcactccatgtctggccaggctgttcttgaactcctgacctcaagtgatccgccttggcctcccaaagtgttgggattacaggcgtgagccactgtgcctggccaatgactctttatatttgcatatacctgtgtaacttttacccaggtaaagataatgattccatcaaccctgagggctcccttgcacccttcccattccacatccccccagaggtaaccacccttctgacctctggtactaatagacccagtttgcctggtcgtgaaccttgcatgaacagaaacatacagcacctacttctgggactcatcattatgtccccaaatcataggtaaagtatgttttaaaacaattgctatttggtatcacaaaagtaatacttactgtagaaatgatataaaagcacaaatgaacagaaaatggtggacatcacctttgtacctgagagcttctaagagcatctctgtctatgtgtttgataataataatttgatgtgcccaatgaagaaattctggaaagtaaaagactcttgggctgggcgtggtggctcatgtctgtaatcccagcactttgggaggctgacgtgggcagattgctttagctcagaagtttgagaccagcctgagcaacatggcaaaaccttgtctctacaaaaaatagaaaaattagctgggcatggtggtatgtgcctgtagtcccagctatttgggaggctgaggtgggaggatcacttgaacctgggaggcagaggttgcagtgactggagatcacaccactgcactctaacctgggtgacggagaccttgtctcaaaacaaacaggcaaaagactcttggttgcaactgacacaaacccaacttccactgccttgagcaagattcaattggttgtgtcaagtaactgagagaaccaggggctcaaacaatgtctctgtctctctccccatctttcccaggcttggcttcatttatgcaaacgggctctgtctatggccaataaagcggccaccagcaacccctgactcaacctcccgcttcagcaaccctaagagcgtctttctctatagtaatcccagggcaaactctgattggctttgctggggtcacatgtccatccttgggccaatcacttggctaggctgatgggggactctaaatggtcagctgcagtcatggtggggcagcctcatggttacagctgcaccagaggcagggagttggcgaggggaggtgttccaaaggcaccagagaaggaacacagaaagagtgttggggagacctaactagggcagctttgtcctgcacagtcagcaggatgttgtccggctaggctggtggctcacgcctgtaattccagcactttggaaggccgaggttcgcgaccagcctgagcaacttagagagacactccccaccccgtgccccatctccacataaaaaataaaaattaaaattaattggccgtggtggcatgcacctgtggacccagctactcagggggctgaggccagaggatcgcttgagccagggaggtggaggttgcagtgagctatgatcgcaccactgcactccagcctgggtgacagagtaagactctgtctcaaaaaaaaaaaaaaaaaaaaaaaattgactctctgctctgcagagcagggtgttcctaaggataggggctggaacttttgtctccttagtgagctcagacccaagtgtctcaatctttggtcccatcttcgtgcctccatctcatattttacaaggtcaaaaaagcatcagggcttgaaaaatgaggatgtggagaagacaaacctcaacaatcgattcaaaaccagctgaccatgacctcctgtgtgcaccaggccagcctcctggttgggtccctggcacggcatccagcccagagcctggcacagaggtagtgttgtagtagaaggcggcactagactccagaggccaggcttggaccctgggccaaattgaggactagctaaaacagatctgggatggaagctcttccccaaacaaagcatcaccctgtagcatatgctcaccagtgcgccaggtcagtttaccattgccatggcaacagctggaagttactgaccctttttacggcaaccactggacaaaccggaagttatcctcatcctagacatttttgcatcaactgctccttaatttgcgtataattaaaaatgggtataaataagagtgtagaactggctctaagctgctactctgggcacgctgcctatggggtagccctgctctgcaaggatcagtactgcctctgtggctgcctacactgcggcttcaataaaagttactaacacaacgagctcgcccttgaattctttcctgggtgaagccaagaatccttttaggctaagccccaattttggggcttgcctgtcctgcatcagtgtcatcagatgtttgaataaatggagggaggtgataacagcatttacggtgcacttactgtttgccaatcctccgtaattccctggacatcttactttagcctcatgtgtttcaggcactggagagtcctctcttccggggtattactttgattcccatataataggtttgctattgtatttatcttacttttactattaagtgtttagggtgtacaagagaaaagataccaattctttctcccggagtttacaatctagtgggtggggaaactgaggcacgcacagttgcgcagagcagtgtggagcatggggaggtgggtgggtgtttggtgggggagtccgtctggaatgagtccggagtattgatgagagggatgagagggatcccttgagctctgaggtgggctagaggagagaaaggggtctcagcagtggcgtccccaggtctagaccggtttcagccagtccagggcggccagggctgctcttatccaggccctctcccctcctccttcccccacctcccctctgcagcagccggcgcagtgattgacgcggtaattggcgcgcttaggcaccgggctaattgaggtcaggctgcagattgcagtggctgcttcgcagaggcggtgggcgtgggggctgcgcgcgctccctccccctgcagggcctggtgtgaggacgtcgtggagcggggaggtccccccaccccgccccccgtcctttttcccttgggagaacgctctccagcggcaggtgtcgtggggaggtctcctgggccctcccatttcaaggggatgggaaacttcagacagagggaaagagaaggccagggagctctccaaggcaggttgaacccatcttggagcctgaactcctggggagggaggggctcgggaaagagcccacgggtgggggcgggggagccttggcttgagtaattccccctctttgagcttactctcattcattcacacattcattcattcaacactcacttattgagtgccctatgtgtttgaagcactggaaataaagttgaaataaagacagacatggttccgccctcaggaagctaacagacactggggagataaacgagctaatagttgctattgcaaacatatgctgtagagagacattatctgcagggaggcaactgaaatggggtggtcagggaaggcctctctagggaagggacattacggctgagacttgagggacagaacactgggaatgggcagagtgtgagtgatgggggcagggggaacctcttctctaagacgggggacagaaaaatcctgatgagcaagggtctcggatggacctgtcattctgcaacttgcttgtttggacttacataatcctgagatgaagacacgttggtacgtgtagttctagtacattcattttgcctgtgctttttctaccatgcacagctggttcttagacaaacagcagttccagaatggtttctgaaacccctactgcagaggtggtgtttagaggatttggctcatgtggtgcgtgggggcaagaaagctgacagggactagagattcattgcagacagctaacatggggagcatagagcaaaaagggaaatatttatttagctttgcaaatactccccaacacttaccagcctaaaggagccagggaaaggggcttgggctggaagacaagaggtggcctgagtcctcatctcaactcaaactcagtgtaaaactctggggaggtccttttcccttttccatttgtaaaatgggtgtatgcgtgagaataagacaaggttagtcatttcaaagtggtttcctgtctgtgttttcttagattctgttcttgtctctttggcatccattaatcacaaggccaacatttcccctgtgatccagagtccgtgctctgaaccactttaaaaaatttaactctcaggacaggtgcagtggctcatgcctgtaatcccagcactttgggaggctgaggcgggaggattgcttgggcccaggaatttcagaccagcttaggcaatatgggaagacccagtcactataaataatttaaaaatgagctaggtgtggtggtacgtacctgtggtcccagctactgaggaagctgaggcaagaggattgcttgagtctgagaggtcgaggccgcagtgagctgtgattgtgtcactgcattctagcctgggcaacaaatcgagaccgtgtctcaaaaaaatcaaatcaaatcaaatcaaatcaaatcaaattcaactcttttgcaccaagccatcattttcactgtcctaaataaacccagggccaggcaccagacaactacggaaatcccttatgcttcccacctaccagaattattcaaactatcctcaagccatttaccctgctttgcctttcccaaggaaacctgtaggctgtagctgctcctgctcctgcctgctgaccaatcctggtgattcccatgtggccctgcatggtgtggcatgcccccttgtcttgggaactgtaaggaattaattatttcaatggtattagcctgtctgcgtcattactcagtcaacttcataaatttagatctgggcagacatcggtttctcagatggttttgtgtatgcctttgggggctgtcaagaggaatgtggagaggaggagcaggctgctctgaaggatttggatgtgcgtgccacaggtcccctccctggcctcacgagagctgttctctgggacatatatagctgtcacttctggggaaagagttttgctgctccttaaacttcagaaaaccttggtcctacaggctcatccatctcaaagatttgttctggcgcccatgttggtgctacagggacagaaattcatccacttctgttttatggtttcaaagggtttcttcaattatttgctttgttgactgaggacaccttgtggaccaattatttgctgatggctctcatggcttccattctctgcagttattgtgggggctagaagtctgcaaactacatttgtcagatgatctcatcagctggggccagtaggttctgctaacgggaggttctagcaagagacgaaacatggcagcagtagcagtagaaatttcagttgaccacagacaagtgtgggttccagcagggtcagtggttccattggtgaccatgggagtggctcctgctcaatggcagtggcagcacctgcagcagctcagtagtgagtgctggcctgtgggccaagcatggagtgtaccagcttcttgataattgggtgccaccttctgttcctgtttgctcttctgcttctcctagccaacaattttgtaataaattttatgcattcagtccctctctgcttgaaatatcttaagggccttctatttctccaatgggacaatgaccgatatacctatataacttggataattagaaaggtacaaaaaagaccgtatgctcacctggacataagtgccatctttggcagcattactaggagtatagttccgggagacctaggtgatatctggatttcctctttgctgatgagagtcaacatggaggacagtactgggctggacaagattctggggttctcagtaatcctgagtgggcagctgggcagtattgtagctggttagaaggtgctatgttttaagtatttgcccccttaaaactcatgttgaaatttaattccaaatgtggcagtattgagaggtggggcctttaagaggtgatcgggtcgtgagtgctctgccttcataaatggattaatccatttatggattaatggattgatgggctaatggattaatgggttatcatgggagagggactggtggctttataagaagaaggagatctgagctagcatgctcagccccttctccctgtgatgttctgtgtcaccttgggtccttgtgaagtgtccctatcagcaagaaggccctcaccagatgtggcccctcgaccttggacttctcagcctccataactgtaagaaataaattccttttcttgataaattactcagtttcaggtattccgttataagcaaaagaaaatggactaagatagaaggtgagattctaaatcatcttttcttatctgaattatggaaccagcctcctcactggtcaccctgcctccagccttgtcccttccaggtcattttctttttgtttttttcaatctataggtatttttttattagaaaataaattaagcgttctcactagagactgaagaaggaaattaacaatcttacaattctagaacaggcaaacttcatgataagggattcttagttttcaaagtgtggggtgctctttcgcagatacactcttggggtgggggctgtaagttttcctcagatattttacattttgtgctttaattcttgttggtactctaaatcaaataaatacacagtgttcaggattatctggatggtcatcttaaataacagcgtgtcccacataatcacagcctctgcaattatgcctctgatccatgtgataccaagaccaactaagcttaacttttcatatttctccaattgggtcctgagactcttcacagaattgttgaacatttcctatgagatctgtgagaggacaaggtggagaacactggttcagagcagtgattctcaaggcaggatgggatggggtggggttgagtggagagatgcatgtagtttgaaagagcacattcaaaatacccactaatttaataacaccaactccataaagtcaagcagcgaaattatttcagctaatgggcagtagcagaaaaccaactggattcatcattgtggagaaggagtctggataaacatagttgaaaaacaccggcttagaggtaggggcatgccaacacatggggaacagtaagaaatgcgtgccaaagagaaagaacaattgagggtcagtgagcgaatcctaggccagaacttgtcacagtcttttgaaaaccaaagagcgcatccagaagaaaaccaagatggtccgtcaaccttcttggccctgtggttaagaacaagttgatcaactttcaaatactgagccaaaagaagaaaaaaagctgtttgtgcccccaaattcatccaccaagaagtgatgtcatcatttgcaatgccatccagctcttgaggagagacatcagcatggggcctgctctgtggttactgcagggctccaatctgctttagccacgtcagcagttccctgctctgttacatagtgactagatcactgcatccgcctatacaatctttaccaataaagactcgaggcaccattcttgctcctgtgagctgtttcaaataatcttgaatctcgttggtgtggttagtaagctgtgatattgacagctactactactacttccagaagcccctgtttgatgggcaattgactgaggatctcttgggtcttccagcagtatgggcaggtggggttgatgaacacaaccagcttcccaggctggattttgcagttcacaaactattgagccatgccaatgggctgtggtctccctgggaggaatcctcagttgcaggcattgcttggggtattgagcttatttatttccttctttccttccttccttccttccttccttccttccttccttccttccttccttccttccttctttccttccttcctccctccctccctccctctctctctttctctctttctttctctttctttctttctttctttctttctttctttctttctttctttctttcttccttcctttctttgtttcttccttccttccttccttccttccttccttccttcctttctttcttctttcatctcactctgttacccaggctggagtgcggtgatgcaatcacagctcactgcagccttgaacttctgggctcaagcaatccacccacctcagcctcctgagtagctaggactacaggcatcagccaccatgcctggccaatttttatattttttatagagacagggtcttgccatattgcccaggctggtcttgaactcctgggcccaggcaatcctgtcttggcctcccaaaatgttgggattacaggcatgagccatcgcgcctggcccctcccaggtcattttccacatattgaaccggagggtctttcaaaaccattccaatgaagcaccctccctgctaacccctgtcccaaatcaagacccgtcagcagctctctggtgctcaaaattataaacttgctattccagacctttcctaacctggcccctatggaactccccagcctctgcatgatctctccttgccttgcaggttatcatctagctgccctgaatcacctgcagccccctgaacatgccatgctctatttactcaactgatatttattaagcatccactgtgtgcctgacagtgttctaggcattggggaattggcagacgacaattcaggccaagtctcttctttcaagaatctctcctccaggcctttgtacatgctgttccctttgttcggaatgttccttctgccccgtttcctatccctttttctcctttcaccttggtatctgccatcttcagagctgaactgaggcagcacctgcttagggagtctcccttgaccccaaccccagactgtttggatatttcctttacgctcctacaaccccccggctccctgagcttcctctaacccaaacatggatctctgaattgtcactgttggtttatactcctagagtatagagtttagagctcctggagagtgggaccttgtctgatttggtgggaccatgtctgtgtccctagacttaacagcgtctggcacgtgaatttgttgaatgaatgaacgaatgaatgaataaccatggactacaaaagcaggaaacactttttggagggaaatgaccatgcaggtcttgaaaggggcacccaagatggttccaaacagatatcagaggactcagggtccttgtttcctctggctcccattatcctcaccctcagcatctggtgcttcgcgatctactcctactggcctctccagccctatttatgctttctcaacccagatccagccctttgagccaagtaggatttcagatttgggctcagccagatcctggctgtgtaaacttggaaaataactccacctctctgtgactcagttttcttacctttaaaatcatttagatcggggtccccaaccttggggccaaggactggtacgggtccgtggcctgttaggaactgggccgcatggcaggaggtgagtatcaccacctgagctccacttcctgtcacatcagcagcagcatttcgttctcataggagcacgaaccacatcgggaactgtgcacgtgaaggatctaggttctgtgctctttatgagaatccagtgcctgatgatctgaggtgaaacagtttcatctcaaaaccattcccccacccgaccaccattctgtgggaaacttgtcttctgtgaaactggtccttggtaccaaaaaaaattggggactgctggtttagatgatctctgcttcccagggcttttgtgaaatctccaggcaataacccatgtaaagcacgagcctcagggctggggctgtagtcagcactcaatgagtgggtgctcttattgttattgcttatgctgagagctgtagggagccatggcagctttcagcagaggtgggagtcatggggttggatttgctcctcagatctccagagggggctctggggaggacaacctagacagggcaagagagaaatgggctggtgcaggctggtaatttacacagctctcaaaatcagatcattaatgcttttggccaacggctattgtaaaaaatttagagtaaaataaaaaatacaatataatcttcagagtaaattataaaacacaaagcagaaacaaattagacaggcaatacaatctcattgaagcaaaccagttttcccagggacaactctgggctgggtcagaaaccactgctgctgggcccccatagcactgaacaggtgacaggaagagtcacaaacatatgtgtggcttctagggacttgagtttccagattcactctctcttttgtttaaaaatcgattaaaaaattattgcaatgcagggtgcagtggctcacgcctgttatcccagcactttgagaggcagaggtgggagaatcacatgaggctaggagtttgagacctgcctaggcaacagcaagacctcatctctacaaaaagtttaaaaattagccaggtatggtggtgcataccttagtcccaactattcaggaggctgagctgggaggataacttgagcccaggaggtcgaggctgcagtgagctatgattgtgccactgcacacaattacatattcaattattgctaaagacataagatgaaaaatctccctcccaccccaggctgtcagtctccctttcaccaataataatgtattgtttatttcacctgaaaattcccattcctttgcaagtccagatatacacaaataattcctttgtttccaatacagttaatattttacaccctgctttttttacttcatgatgtgtctaggagatctttcatgttagggtttgtttgtttgtttgtttctgagacagagtctcgctctgttgcccaggctggagtgcagtggcgtgatcttggctcactgcagtctctgcctaccgggttcaagtgattctcttgtcgcagcctcctgagtagctggaattacaggtgtgcgacaccccacatggctaatttttgtatttctaatagagacagggtttccctatgttggccaggctggtctcgaactcctggcctccaatgatccaccccccctcggcctcccaaagtgttgggactacaggcatgagccaccatgcccggcccatattagttcttttaacagctgtataataatccagtatgtgaacagaccataatttacttaaccagaccctactaatggatattcaggctgtttcttcagtgagtttgtaagagaaatttctggaagtgaggttgatggttaaaggatacaggcattcttgatgttggtaaatgtttccaaattacccgcttttaaggggacactattgatgctctctctagagcccattggatcttttacatttggggtgcttcccccgacctctgtgtgctttttttttttttgagacagagtcttgctctgttgcccaggctggagtgcagtggcacgacttcagctcactgcaacctccacctcctgggttcaagtgattcttgtgcctcagcctcctgagtagctgggaccactggtgtgggccaccatggtctgctaatttttgtatttttggtagaggtggggtttccccataatggctagggtggtctcgaacccctggcctcaagtgatctgcctgcctcagcctcccaaagtgctaggattacaggtatgagccaccgtgcctggccatgcgttgttgtaagagaagagttcatgcctgtgaccttcgttggaggcctgttcttcagctactggagctgccttgtccatggaacgaacctgaaatgcctggctgttaagccccaccttgggggacttagtcaacaacagaccgggacaggagtgtgaaagcccagtttccttgcctggagactgttttacactccagagctccctgtgggatgtggctgaggctgggactttgctgaaagtttcactggggcaggcgtacactctaagatggccctaaggggcttgccttctggcactcacacccttgtgtgatcccttccctttgagtgtaggctgtgatgtgatgtcacttccaagattaagtgataaaaagaccatggggggctgggcgcagtggctcatgcctgtaatcccagcactttgggaggccaaggtgggcagatcatgaggtcaggagttcaagaccagcctggccaacatggtgaaaccccatctctactaaaaatacaaaattagccaggtgtggtggcgggcacctgtaatcccagctacttgggaggctgaggcagagaattgcttaaacccaggaggtggagtttgcagtgagccaagatcgtgccactgcactccagcctgggcaacaagagcaagactccatctcaaaaaaaggaaaaaaaagagactatggcttttgtcttggggtggccctctatttctctctctccctttcagggctgtctctctctagggcaatcaagctgccacgatatgatatgatatgatatgatatgatatgatatgatatgatatgatatgacatgatatgatatgatataggctatgataggatattatatgatatgccatgatacttcagccatctgaagtggcagggaactgatgtctctacagccagtgaggactggaggcctgtccacactcacaagagtgagtttagaagtggatcttccccaggttgagcctttgattttttgagacagggtcttgctctgttgcccaggctggagggcagtggcacaatcttggctcactgcaacctccacctcacaggttcaagagatcctcgtgcctcagcctcctgagtagcagggattacaggcatgcaccaccacacatggctaatttttgtattattagtagagatggggttttaccatgttggccgggctggtcttcagctcctgatctcaagcgatctgcctgctttggcctcccaaagtgctgggattatgggagtgagtcaccacgcccggcctcccagttgagccttggggtgattgagccccagccaacaccttgactgcccactcctaagataccctgagacacaaccattcagtgaagccactcctgggttcctgaccacagaaactgagatgatcactgcttgttgtttcagatgctaagtctgggctaatttgttatgcagcaataaataaccaatgcatcttactgggcttccttccctttcctgtcctgcctcccgcactttctcaccagtcttcactgggagcactcttttttttttttgagatggagtttcactcttgtcgtccaggctggagtgcaatggggcaatctcggctcactgcaacctccgcctcccaggttcaagtgattctcctgcctcagcctcctgagtagctggaattacaggcacctgccaccacgcccagctaattttttgtattttttttagtagagatggggtttcttggccaggctggtctcaaactcctgacctcgtgatccacctgccttggcctcctgaagtgctgggattacaggcgtgagccactgcgcccggcctggagcgctctgttaatacaccacctgcacagatatccttgtctgcttctggggaacccaactcaacacactcctataggcttgtgctaatatacattgttggcatttggagggggatgagctgttttccccatggcttcacctacaccatgcacatcaaacttttacacgcaaatatagccttgaactggacaagccaagataactttaatcccaaagacagttccacagggaggtctgggttttggggctgcagtcactgacccactgccactgacccacctgtagcacctcctgtacattcccacctctctgactttgcttaggctggacctcaccctcacttcacctgcctatcttgtcatccttcccataaggccaagatcctaaatacccgtcctccagagcatctcctgacctctccatctggaagtgatgcttccctccccttgagctcccttcaccctctgtgcctccttctgatggctttctgatgggttttacccaacttatcattatttctgctcaagtattatctccctgcctgcacaaagagctcttttcaggctgagatccacctccctggaaagtggttggtacagagaagtcatggagacactgtgtgaatgaacacccagactcagggatgtcctggtgggccagatggcagccatcctgaaccccctagtctctgtctgccccacacccagcagccctcctcactcgtcctcctccctagcatccctcaaccactgtattagtctgttttcacactgctataaagaactacctgagactgggtaatttatgagaaaaagaggtttaattgactcaccattctgcaggcttcacaggagacatgactgggaggcctcaggaaacatacagtcacggcggaaggtgaaggggaagcaaggaccttcttcacatggtggctggagagagaaagagcgaagagggcagtgctacacatttttaaatcatcacatcttgtgagaactcactcactatcacgagaacagcaaaggggaaatctgcccccatgatatggtcacctcccaccaggcccctctcccaattcaaaatgtgatttgggcagggacacaaatccaaaccatgtcaaccatgctctggttgagacctcattacctgtgctgacaatcaaggcccccccgtgacactgctgctcccacccccgcccactcttgctgcccctgctacccgcactgtctattccagccatgcagagctactcatagttatctagaaaccaaactagctgccattttcggagccatgtctcaggccctgtgctaagcattttacatcctcatgattgctgtgtgtggggtaccattttcagccccattttataggcaagaaaaccaaggcacagagaagctaagtgtacacagccggcaagaagctgaggcagctgcttttggtgctctgctgcctctttcatctttcctgggggtcaccagtagacggctcttggacatgcctcacccgagggcattctttggcctcctgaaggtcgctcagccagcaggggcaggccagaagtcacggagttcaaacctcaggagcagccctcaatcaatggggaggagtcccgcttcctcgtccctcgcagggacaatgttgcacgtcctttctctgagtcctcagccggataagctccagttacctgctcacgaacacacccgtattgacctctttctcttcccagtctcacctccccactctttcaacgtgctgggaccacctcccagataaaccatgtgcacccaaatccttgtcacaggatctgttttgaggaaaaccaacaggaagcaacagcagagtggaatttgcacccagtctgcctgcctggggccactctgctgcccagacatccagacatgactggctgtgccaatggcttcatgttcctgtccatcttgccccaaaccccacccatctctgcccaccctcctctgtttaaaagaccctgcttacctagatttttgtgttttttggagacagagtcttgctctgtcgcccaggctggagtgcagtggcacgatcttggctcactgcaacctctgcctcccgggttcaagtgattctcctatttcagcctccagagtagctgggattacaatacaattttttttttaaatttttagcagagatggggtttggccatgttggccaggctggtctcgaactcctgacctcatgcgatccacccgccttggcctcccaaagtgctgggattacaggcatgaaccatcgcacccggccttacatagatattcataagaaaatttcactgacatcctttttcccagttagaattgaccactcccttaggatctcaacagacagacttctccccagcccccatcatatcccagtgcccttatttgtgggctttgggcaccacctaccaacctgggatgtcctactcatggagaacttgctctcgtgtcttcttcactatggaaataccccggtccacccaggactaaacacacagcaggtgctaatccacctttgaatccactgtggccccaaccacagatctctcctcctctttctgccccctcacctcttcccaccccgccgcccacgcattttacatcatttctgagaggtacaccgctgtttccatctctttgctggcctgtttggccaccctaagggtgtctcgccctctcgttctctgatacatggtttctctgtctctctttctctctgcagacttctatctcactccatcgcactcatttattttcctatctgcctccccaactggattgtgagtcctttgaggccctaatgtatcttgtttatcgctatatccacattgtgcccttcgtgcattatctactacagactgcatgctaataaatgtttgttgaatggatgaattaattaattacttaatacacgtatccctggatccctcaatggaaggacatagaaactgatataaattcttaggattgtaagtgacagaaacccaactcaagctagcttaagcaaaagaagaaatgtattgacttaattattaggaagtccaagtagacttcaggcatggctggatccagaaaccaaacaaagtcaacagttgactctcactcatcctccttctctctgtgtatatctctttgcctctctgtatcttttttcatgttggctctggttctctttcagttttgaccacattctcctgtatcatagtcaagtgcaaatgcaagacttagtcctctctctctgggcctcaatttccctcatctgtaaagcaaagagtcaattcaacctcttgctctctaagcctcctttatagcaatgtagtcttaaaggggatccaagataatgttctcattttctagttaggaaaaactgaggcccagagaagcaagtgatttgttcaaggttacccaacaagttaggggcggggctgacaccataacccaagtctcaaaccttcatggaaaagaaggacaatattatttttgacacagagaaccccagagagaagggccttgatactgagtcagagtcacccacctcctctctgcttccattctatcctatccaaatgctgagaatcctggaccaccgaaggttttgtatcaagtgcgtttacctcccataaccccagacctggatttgaaaatcagctccaccacttggcagctgtggccctggcaagtcatttctcatctgagcctctgcttttttcatctggagaatgggacaatgagccctaccttctgggttgttgtgaggactccaggaggagatgagagtaactctcttagcaaggccttgcatgaggtggtaggccataactcatcccagttaggctgggatcatcccagtttggctgggatcatcccagttttaaaacttaaactcttggctggttgtggtagctcgtgcgtgtaaccccagcactttggaaggctgaggcaggaggatcacctgtgtccgggagttcaagaccagcctgggcaacatactgacacctcatctctgcaaattattaaaatattagctgggtatgatggtgcatgcctgtagtcccagccactcaggaggctgaggtgggaggatcacttgagcctgggaggtcaagggtgcagtgagccaagatctcactacagcactccagcctgggtgacagaatgagaccccatctcagcaaacaaacaaacaaacagaaaaacaaacttaaagtcttacatcccaggaagctgtttgtcctaggccaatctgatggttggttacggatgtcgtttggatgtgtgtcccttcccaaatctcatagtgaactgtaatccccaatgttggaggtggggcctggtgggaggtgactggatcatgggggcatatttctcatgaatggttgagcgccatcccccttggtactgtccttgtgatagtgagtgagttctcttgagatctggttgtttagaagtgtgtagtacctctcccctcactcttttgcttctcctcccaccatgtaaagatgcctgcttccactttgccttctgccatgattgtaagtttcctgaggtttcccagaagccgagcagatgccagcatcatgcttcctgtacagctttcagaactgtcagccaattaaactttctttctttataaattacccagtctcaggtatttctttacagcaatgtgaaaacggactaatacagctatcctctcagtcaggcacctatactgggcagcagggaggaagcagtattctcagaagatcccataaatcaggcctgaacaaagccagatctctcagaaagatggaggaatcttgcccaagacaatgctgagaagaaactttccgggcctttgggccctttgaagtttggagcaatttgtacaacaagaagcctgagaggctgtttctgcctcctcctccacctgtctgtccctccagcttcttggacattcaggggctctcagaaactctgactccaagaacacatagctggagaaaaccctgattctcacccaatctcactgggcactctcccactgtacagatggcaaaaccaaggcccagagagggaagccccttgcccaaagtttcatggtagactgtctccagcatggctgaccttgcagatatgctcctggatgctttcagtgaaaattcagtttacacccatgctgggagtaggggttgggggagacaagtgagtgatgtctgtgtggcaaggggaatgagcacaggctcaaagcccagctccccaagccacaaacttgctgagtgactcccctgggcctcagtgacccatcagtgaaatgaaggcgataatcttgcctggggtgccccaggcgctgtggctaagtgacaaagagcagtgggtagcgttagtccttgtatggctagcagagcagaaagagccttcacagactgattttagtgtgtctggaatcttgggcattcccagatcaccccttagctaccacctgtactattagttacttaatatatttctttaaaataacttaaagtattttaaaggaatatgaaacattacttgttatgatgtactagtttatatatatatatatatatatatatttttttttttttttttttttttgagatggagtcttgctctattgcccaggctggagtgcagtggtgtgatcttggctcactgcaacctccacctcccaggtccaagtgattctcctgcctcagcctgccgactagctgggactacaggcgtgtgccaccatgcctggctaatttttgtatttttagtacagacatggtttctccattttggccaggctggtcttgaactcctgacttcaagtgatctgcttgcctcagcctcccaaagtgctggtattacaggcatgagccgccactcctggcctacttatatatttctttctagcactacttaaagtaaattcaaagtattcaaacaaaaaagttggatcccggaatgcctccaaacctagggcatatccccagcagcatgcatgttgtacttcgttaaacattgatttcatcctatccctgctccctgcatcccattgtaaactcagatccagagaggaacaaggacagaactgaagtcacagagagagttagccacagggtgggcgctagagtctagacccctccactgttcccaccattccaaggtaggagcccttgctgaaaggaggagccagggcttttcctgcttccagatattttcacgtcctgtgtccccacctggaaagccctttcccctcaattgtcccaggccaactcccagattaactcccgttcatcctttgaaactctggggagcttccctggcaagcagagcaagtctgtctccctcatgtgacaccccatcccagattataatgacctgtttgggaatctttctccacactgagacagggaggcccagttctgattatctccaccctgaatgtgctccctggggctggacacccaggaggctccgggcagcactgattaattagggaaatctgaaaacagtggagcccagagccctggatcagtcctgtctgggtcccaagagggacagggccaccaggctggcagcttgtcccaagtgatgaactagttcagccagggcccccatcactccactagatacatttcagctgctgagaaaaaagttcaggggctcacctgggtctgttgcttagcaacaggaggctgtaaatgacatcgctcctgacactttaactaacccctccatggcaggtggaggataatgaaggcaaaggcagacagtgagacggaattgaaagccagactcaggagtgaacagaggcaggttctgggaaatatggaagcctgcagcaggcagttgtgggcctgggtatatgggaggggtccttgagacagttggtggctgctctgttcctgggagttctgttcaggtgtcctgggcttatgtgtgccagcctttaaaggggatttgctaggcttggtccctagtaacaggttggtaattccctgggcactatgtctgtaattccagcagttgccgctaggaggacagcagcaacttcaaaggtagacgactcagggtagacataactatacacctatcaaatctatgagttggcagggaacctagtttagaagggagcatttaataagcaccgccttacttttattaactcacaagatcctcataatacctctccatgattacagaggtatttccacgttaaagatgaagaaactgaaagctattcattcaacaagtatttgttgagctcctcttgtaaggcagttactgctgtagggtctgcatagacagcagtgagcaagacagatggaaatccctgccctatggcattctaatcaagggatagataataaagaagagaaatgagtaaaatatatggtatattagaagatgacaagggctgtggagaaaaataaagcagaaaaagatattgaaagggacccagggggaatgggtacatggagtagtcagaaaaagccttagggaggggcatttgagcaaaggccagaaagaagtgaggaggaagtcatatgactattcaggggatgtgcatgccaggcaaaggtcctgcggtaggtgtaagcttggtatatttcaggtttggaaggaggccagcatggctgctgctgggttagaaaggaggaaagcagaaagacatgaagtaggccattgtaagaactctgggtatttctctgcatgagatgggagccacaggagtatgagtgttgaatttgccaaataaaaatacaggatgacgactaggcgaggtggctcatgcctgtaattgcagatctttgggaggctgaggtgggcagattgcctgagcccaggagttcaagatcagccttagcaacatggcaaaactccacccctacaaaaaatatgaatgtggtcgcatgtgcctgtagtcccagctactcaggaggctgcgatgagagaatcacctgagcctgggaagttgaggctgcagtgagtcttgattgcaccactgcactccagcctgggcaatgatgtgagacctaatctcaaaaaaaaaaaaaaatccataaaagggtgcccagttaaatttgaatttcagataaagcacacaaaaaaattttcgtctaagtatgtccccaatgtcgcatgggatatgcttataataaaaattatgtgctgtttatctgaacttcaaatttaactgggcatcttgtattttatctgacaaactaacatgggagggtcttgagcagaggagtgacatggtctgacttggatttcaagtggatctctctggccagtgtgtggtagacagtctgaggggtgttatggtggaagctagaggccccatgaagaggtcgttacaaatgacccaggtaagagatgatggagatttggagcagggtggttgtgagaagaagtcaggttctagacacattttacaggtagaacaagcaatgcttcctgttggattaaacgtggagtgtgaaagaaagaggggtcaaagctgactctgaggttttgggcctgaatggctggaaggatgaaggagtcatttactgagataaagaagggtaaggatgagtggattagtggggaagaaaggggaaaatcaggggttcaggtttgggtattttaagtttgaaatgttatgaggcattccacagggagatgtgagatgggatgctgtacaggttaaatagtgtccctccaaaatttgtgtttacccagaacctgtgaaggtttttgcagatataataaagttaacatgaggtcagactggattagggtgggtcctaatccaatgactggtgtccttataagaagagggaaatttgagcatagagaaatacacagagggaagatgctgtgaagacattaacaccatgtgaagatggaggcgaagactggagggaaacatcaagcctagggatgccatgggtcgctgggatctgctaggacagatctagaggtctgcaggaggggctctgggtggggctatgatttaggacacatcagggcacagatgatattaatatattattttttaatttaaaaatttttttttgagacagagttgcgctgtgtcacccaggctagagtgcagtggcacgatctcggctcactgcaacctccgcctcctgggttcaagcgatttgcctgcctcagcctcccaagtagctgggattacaagcacatgccaccacgctcagctaattttttatatttttagtagagatgtggcttcaccatattggccagctggtcttgaactcctggcctcaagtgatccaccctcctcagcctcccaaagtgttgggattacaggcatgagccactgcacccggcctgacattaatatttgaagtcatagattagataatatcaccaaagcagtgaaagtagatgaagaggagaggaggaccaaggactgagtcctggggccccagactgaacaggtgggaagttaaggggtagccaaggaagggtacagagaagaagctgctggtgaggtgggaggagcaccaggcaaaggcatgtggagaaagtgtttccagaagaacatgatcaattgtatctattgctgctttaggggccagtaagatgaaaacagaggagtcaccatcgggtgagcagcctggaggtcattggggatttcggccaagtcagtttttgaggggtggtaggggattaagcctgattggagtgggctcaagagagaatggaggctaatgcaggcagatcacttgagtccaggagtttgagaccagcatggatgacatggtgaaaccccatctctacagaaaatacaaaaattagcaggtatggcggtgcgtgtctgtactcccagctactcaggatgctgaggtaggaggatcacttgagcccaggagttggaggttgcagtgagccgagattgtgtcactgcactccagcctggacaacagagtgagaccccatctcaaaataataaaaaagagagaaaatggaagattcttcctcttctttttcttattcctcttatcctcttctcccctctcctctccctttctcctttccctttccttcccctctcttggaggtgccagaattaccagggactgaggaggcagcaggaccaagaaggcagcagcctggctggagaccatggatgtaggggagccatggtcatggtcatcatggttggggtattgtttgcatataggaagctgagcaaacattgagggtaatgggagccagctctccctccccatctaatcagcaccccattcctgccaattgcccctccataatcttgtgatcctcacgcagtgtgcctctgcacacatatttactgcagttctattcattcattgatttaacaaatagttttgagcctgctactggctgctggatggagatcttaggatatagcagtgaacaacacacagtccctgccgtcttgggactcacatcctagagaaaaagatagacattaatccaagaatcacacaaagaaatgtcaaatttcaacaatgataagtgccttacagaagaggtcccttgggcttttagcacataataatgggagtttgacttgcattgacctgagaagataacttttgagtggagacctagtggtggaggtggtaggagataactaggcaaagagccagagagagtggtctaggcaggggacataggtggccaaggtctactgggtgtggggggttgggggttcagggcacatgtgagcagggcaaggaggagtggtgaagatgaggccatgtgttgggtgcagtggttcacgtctgtactcccagctacttgggaggccaagacaggaggattgtgtgaggccaggagtttgagactagcctgagcaacacagcgagaccctgtctctacaaaaataaatcaataaataaggccaaaggatgagcagagcccagaacatgcaggacctcgtaggccatgataaggagtttagtttctttctaagagcactagaaagccagcataggggtttaatcaggtgcaacatgatctggtttgtattctttaaacaatttttttaaactgacacatagtaattgtgcatatttatggggcattagtgatgttttgatacatataatgtatagcaatcagatcagagtaattagcatatctgtcatctcaaatatttatcatttctttgtgttgggaacattcaatatccttcttgcagttatttgaaactaatacattattgttaaccctagtcatcctacactggtatagaacactagaacttgttcctggtatctagctgtaattttgtatcctttaacaaaactctccctatccccactcccttaaccctgcccagcctctgctagcctgtgttctaatttttacttctatgagattagcattttttagcttccacatatgagtgataacacatggtgtttaattttctgtttctggcttatttcacttaacataacgtttgtattcttaaaagattatttggctgatgtctggaaaatggattgtaagagtgcgagagtggaagcggggagaccacagaggtggtttttgtcttgtaggagagagaggatggcagctggactagggcatcggacatggtgatagagaggaagtaggagacagaagtgctgggatgagtgggatgaatggtatcttgactggtggggagggtgtgttgaggagtcaggctttggacttagtaggagggtggatagtggggctgatccccaagagcccagaaaacagggagagcaacaggctttgagggctgatggggcattttgtttgagacttgctgcaaaatgtccacaaggaacatttgagcaagctgttggttgtgcagatcagagttcagactaaggcagtgacttcagcctcaacttatcagcgacaagcatttgaacaagcctaacttttacttatctcaatgcgcagatgagaatgaactgtccaggagaaatgatctcaggctggatcaatcagagaaggtgtcatggaggaggtgggactggagctgggtcttgaatgatgggtaggatttaaggaagggaagggagggtgtaccaggcagcatgaacaaaggtactgaggtgagaataagcatggggcatgccgagggtcacagaaaatgacgaacagcccattttgggtgatggccacttctgtggaggcagggaaggaggaatgaggtccaggaggggagatcaggagccctcagagttcctcataatgttttagtgcttaagctgtgtgctgggaagatgagcatttgttatgtgattaactctattttcttgttcttagatatagtctgtcacccaggcagactcattgcaacctttcccttccaggctcaagctatcctcccacctcagcgtcctgagtagctggtactacaggtgcatgccaccatggctggctaattaaaaaaattttttttgtacagatgaggtctcactatgttgcccaggctgctctcaaactcctggactcccttctccttcagccccccaaagtgctgggattacaggcatgagccactgtggctggcctgattgactttctctctctctatatatattttttgtttgtttgtttgtttgttttgttttgtttttgagatggtctatcacccaggctggagtgcagtggcatgatcttggctcactgcaacctccgcctcctgggttcaaatgattctcctgcctcagcctcctgagtagctgggattacaggcgtgcaccatcatgcccggctaatttttgcatttttagtagagacggggtttcaccatgttggtcaggctggtctcgaactcctgaccttgtgatccacccaccttggcctcccaaagtgttgaaattacaggcgagagccaccgcacccggctgattgactatgttttgtatggttaagatcattttttataattcgtggtctagaggggcgaatagaggggagagtagagaggggtctcttaggcttgagtttacattgcagcttcctaatggtgtgactgtgggcctatggataagggacttcatgcatttgaacctcttttcatctgtaaaatgggcatgaagaactcttacctcatcatctctccttccctctctccttccatttcttccttcttccctccctctctttctcttccttccttctgataaatatttactatgtgtctacagtgtggaaggccctgcacaaggtccgagagatatgttcccttatggtacttacagtctttagagagagatatgaatcaaacatatacatgaatgcaccactgcagacagtgataagagctatgaagacaacaaacaagagcttccgtggtgaagaataaaaagatactgagacagggtggccagggaaggtatttcagaggagatgtgaaggagtttgccttggagggggtgaagagagaggggaatgtgtcggtcagagagcacagcatgagcaaaggtcctgaggtgcgaagcacacagggagctttgaatgttggtgttagcagtccagccagagagtgccaggcaagggggagagaggcatggcaggagaggttgggaagacatgtgcattcaggaacatgggcttgcagagcacgtagcacggtgcttggtgtgcgtgctcaggaaatgctggtggcctttcttcccaccccttcttgggggccatggctagggtgacaaatggacttctgagggcagaaagggggcctggaggcctgggaagcctctaaagagcacctatggtagctatgacgatgaatccaactccttacttcctccccagcatgcccccaattgtatgttcccactctttaccatgttattttgcagtgccctcccattgcaacttgagtggacgttgctcagccatgggacttgctctggccaatgggatgagagcagaggtgcatcgagcaggggcttgataagcacttccgtggttgggcttgcctgcttgtgcctcagctactgccacaagaacatgcccagcctagcctgctggtcctgggaggaggagggggcagagctgagctaccccagccaagccaacccagctgacccacagacttacaagttaattaaatgctgcttgttgtttaccacggggatttttctggctgttctgtgtgtagcactcatttctttgctccagtggggtccctggatctgggtcttttctgccttcacccaagcccaggaatactagaagagagatggttgggccaagcccaggattctgacctcggacctgctgaagcctcaatttaggcaccaggaaagcccttctccatatggggtctcagttttaccatccacttaatgaaacatctggccctgattgccaaagccttcatagggactaagagctcaggttgtccaaatatgactatgtccctcccttacttaaaacactcagtggctctccatagctttcagagagaagtcgaagctccctaggctggcattcaaggctctgcatggctttcctcctgtccacacttgcagtacagctcctaccactcactctttgcttcagccatgccttattggctccagtcttatcatgttgtgcctgttcatgcctccgagtctttgcacctgctattccctctgtttgcaaagcctgccactgcatttctctgctttgtgaattcctatgcatgggctgtggcttgtttttaactaactttcatttcctaacattcactgagctcttacactatgccaggcaccttgctaagctctgtgttctagtttagtcttcctggcaactctatgaggtaggtattattatcatctcttttaaatatgaataaacagaaaagtaaactgactgatacaagtcacagctagtaactggtgaagctaggatacaaattcaggcatcaacaacagatttgaacctaggtctctctgtttccagagcctatgtcctgtggagtcacctctccatgatgcttcttgcagaattctcatgcaagtgcatgaactatattcattcaactcacagatattttcttgagtgccaggcactgtgccaacctcttcatgagcaatgacttccttaatcttcataccagccctaggagatgatgattcttaccaatcccattttgcagatgagaacaaccgaggcccagagaggtaaagggactggtctaaggccgtgaaaccagtaagtggtgaagttgggacacatacccaggcaatcacatagatgcccagacccaaactagacctcctggccacagtgactttcaatttgccataaacttcaagatccagtttgggcaccaactccaggatgctgaatggctaattcatggctctggggagccagaagattcatggctctggcctgtccagcctccctccccacccccaaggacttcagagctgacaacccaggatgcagtatggtttggacagaagtcagatgcttcacaacactgttgggcatcccccatctccccagttttcagcccgatgcactgacccagcccccacccttccccttgggcctcaggctctgaatccaaacaaacacaaaaagccaaatgactttcactctgtcccttccaattcagtgattttggaggagaataaatactgaagccactggcatgaatagaaagtaatataaaactgtgctaactgcacagggatgttttttaaaaagaaaaaaattctcaatttaaaatctctacacaaatagactcttctaaggtcaaatgaaagataaatgcctcaggaaagcaaagaagtcatcatttaggttgaattttttctctctctctttcatttcctctctctctctttcattctgtcccctaccaatatttctttctatccctgtctttgcctctcttatctgccactcgctcttcctgtctgcatgtttgtatgtgtcaatctgtcacttttatttaagtggcagaattgcaactgcaggtgagtagtatgaccttggtcaagtcgtttcccagctctgtgcttctgttttcctatctttacataggaagtacaattactttttgcagaggggtatgaagcaaagcaggacctcataaagtaaaatgatgcttctaaccagagctgggaagtctcacccaccctctaggtttgggcctggaagatggaaaagattaggagcaggcaccatctggtcaccaagttatgccaatgaaccaatggagtgaatggccttctgaccttggcctctttactgtccacctgattcaaactaaagttgtcttaagaaaatgattctggtttgaaaaaaggagaagctgagaaacatgtaaggccagagaagtagaaaccattttaaaggtgagataagagccaccttgaatgggaaaacaaccatatgatgaatttaaatcaaagccagagggattgtgattagtagaaggaagatctccttgacaactgagggggaataaaacactagggaaaacctaccggaatgggaggcgccaggctgtgatctttttagggcagagatcacatctttcttggttaccattatctccacagggcacaatagagggtctgggtccataagtattagttgagtggctgactaaatgagtgagagtttctattcctggagccccctaagacaagactagataccatttccccagaacacagagccttgctcaccaatgagcaatacagtattgctcaccaaccactgaatgaatgttgaatatgtgagtttgctagcggcaagtattgcgtgtccagtattgctgctacagcacacgcatctcttgaggactgagtggatattgaaggggagggggcatctccagggtggagcaggaatcgggggtggggaggattacctgaatgacactttgtcaagtagcctatgaatttctgccttgttagtttgaagtattctgctacctagaggcagagtattggactaaaaaacttctgacagcccaagtatcatctccttctgagagggactaagccagcagatgaagaggagagactagggccatggaaagactggaaggaatagctttttgtcctgggaaaacccttgattgggagtcagaagtcctggtttctaaactcaaatcaatgtaaagcaagaacaccaggaagacaccccagagccttctaactagcaggaactgctctagtcatatagcacagattggatttcctgggaggtggacttggagatggagactagcatgtggggtgcttatcatggcatgctgttagtcgcaatacctgcggatgagagggaaggaagtgggactgagcaaagggagaagtagagttgtgatacaagctcaatagagaccttagctatccctatagatggttctgaagctgggatacttcagagttgtccagagttggagtgggcctttacattgccatatcaatcagttgttggatacaggctaccgcaggaagaggtgttaccttgaatcaagcaactctcttcagctgaggcaactcctgtaggggactgacagctgatggcttcctgccagtgatgctaccagtagatggtggaataaacccttctattatgaagggggatctgggtgtacattgcagttcccaccatagcatgctactcccattaacactaatccttatcgcagtcctacaagctagatattattatcacagtcaaaaactgaattttggagtgtatcaacttaccccaagcaagttgtggagctaattcaaacccatgtcttcctggctcttaattccttcattttttaactacacctcattgcctttgatatcttcaccccttcccccaacccaaattccacctatcactctcaagatcttgacaaatagctcccctccctgaggctcagactctccatctgttaaagaaggagattaagttatatctgagattcttaaccaggggtccatgaaccccatgaaatagagggctaattttggtatttatgagcaaaattttgagttttaaatatttttcttggtaaaagacccatgagattgtttatatcctaaaaggtttatgactcgcctaagaggctgagatataaccggaccagatggtctaaggtcctcttcagcacacacatgctgtgattctgcacccttagagcagaagcaccacagacagcgccaataccattcagcaccacggacagagccacgctctgacgtcttctgcagaaaagtcccatcaactattacactgacccaaagaatgaacgaggcaagaccactgagtgcccaaaatcagtgggataggaagtcagaatctgcaacagacacagatggctttccctctcccccctgccttttctgtaaaagagtcccaaatgttgcaattgtcctcacagtgacatttcccctatcctgggggcctcccgtccctctccccacaacagtgaagaagagggtatcgagccgggcagtggagtaccctggtgacagattagcactgccaaccaccgacacaaaaccatttggtgtggggaaatgatagatgttaacactcattttaaacacaggcaactgaattcctgcagacaggcgccacggctggaatttagggcacagctgctaggttcagataaggtgcagaatcagcccagcataccgcgatgttacttaataatgaaaatgtggtgattgatgctgctgtctcgagaatataacctccccatttggaggttttcagctcccaaatcatccattccacctttttttttttccccctttctttctttttttggaaaggcaatgtgtgtgtggtgggggtgtggatacagggttgatggggcctggcaacatgaagctcatgatgctaaataatttttttaaaagtccaaagagcttagtttgaaagaattcaattctagcaagctcacctgggacagcaagttcaacatgaaaaactggtttggacaagttaccttccatatttttatggtcaaaggcttcttttactacactactccccatttctatgatgtcacaaagagccaatcagagtttttgattcaggacctcaactcccacctcttcctgagccccaggaaagctggaccatttatctactgcctcctgaagagcatcccctggagaaaacctcagattctgcatgtccaaaattagtctaggttagaatatccaagcaagccctttttgctctctatggcaagtgacaccactcaaggcaaacacctgggcattatccaagactcctccttccccctcatctcccaagtccagcatctcacacctgctatttttatctcctaaaccactctctcttaaattcacaattcacctactttttttttttttagccctatagcgttaaaatacaacctcacccccttcccctaaatagccacctgggctccagcctttttctccagttcatctttcatcctgctcatcagaataattttcctaaatggaaatatatcatgccactcttctgcttaaaacccaacatcctgtaggcattcaatgtcctgtaggacaaagtccagtttccttaccatagcatcaaaatctttaaggatctggtttcagtgtatccctcaatgttactcacaatctttaccaaaagcacctgaaataaatgcttatttctgcctccttgcatttgcacatgctgttccttctgtcttgcaggaccttcctctcctttttctgcctgaaaggcattcattcttcaagattcaaggctcaaattgtttctcctttgaagagtcttccttaccatcttccccactcctgacaatgtcaatttcactttcttctgtgctgttacaattatagtcaccctgtattacagtgacaggttgccatcattccctcactcgctagaattgggttcaaatccctgttccattatttttcagctctatgaccttcagtaagttgtaggattctctctggccctcagtttcttcttctgtagcctggagataataataatacctatgtcatcattaaatgataaatgtaaagtatccattgtgtaccctgggacacagtaggagcttaataaatattaatttcccagtagagaaaagttgttaatctagagcccatggaagacttgggaagtccctatctcaggtcagggtcctagaagcagagcctcagaggaattctgtgcacagggtttattgagaaagtgctctcaaggaaaggagagagggaagcaggagagggaaggggacaaataaggatgttgtttagggtaaagtctgtccttggcctaatccaaggggggtttggagcataagttacaccacagagttgtccctacctagaaacaagggagttgccttctgtacccccttgtcagccatagctggctatgggctgatgcagggtgggtgaacaagggtgtaacctcccagaagaggtgaccctcatcagccgagattgatgctacaaagaagggagcagccattgagggggcattgaagcctacagcaacagggggacaggtgtgcctgccagtgggagggggtttgaatgcggtgtcaacagaatctactagtcctgagagagttactgctttaaggaggctgagaggttgttttgcatggaatggaggcagagcccagactttatagatatctccattttcactcatgcaataattcatgtattcattcaaaagatcttcattgaacatctactctgttccagagactttagtaggccctggagatactggagagcaaaaaaatggcatctttagggagctcatagtctagtaagggtgaagatattcatcaaatgatctgtcttcaaagacaaaggtttctgaagagaaggaactcagttctgtgcgcgtgtatagcagagggactcagttcagcttggggcacttaggagggcttcccataggaggagacttttgagtgaaggtatgaagggtaagagttcactggtgaaagaagggagataattaggataggaaggagagatgtgtggctctcttcttgcttgcttttggaagtcctgctaaaaaatgtgagagagcatctctaaggcagggagtattgccttagagctgttgtcggtcatttacccttgagtataaatgacattttagttttttttccctgcaagtagtttgttgaaggggaatgaagaaaaaagcctgaggggcactgaatgctttggagaaaagccataaaatggcccaaaataagagttggggagacaagggctttgagacaaacttgctgattttgaatcttgcagccaccgctcctccctctgtcagggcctctctccctgtctctcacagaccttggagctggcgggaagaagcttggcttggagccagccatgtccagcctctgccttttttgaagccagaggtagcagctgcctatgcaacatgaactaagtgcccagctctactctctctctgctcaaccctactgccaacagccactgttcattgcctgaaattcccatcattaatgtcccaaagcctaggctgggtgtcctaggagctccattcttattctggctgtcttgttctgaccttgggcatgttccttcatttctctggatgcaagggccagattggattcatctcctctgaggtccctgcagccctagctgtctatgtgttttttcctcaccacagttaacctattaaggttgcaaactcaaggtggtgttctggagacccccaagagagctgggggatatctgagcacctggaatcgaggctgagcaccttcctcagtcttctggctggcagaagccgtggcccaggagttgggagggagaagggctctggaagaggccctcagccccttgtggccctttaaatgctgccaaaatgactcctgctccgtagattgctgcctggagctgtcagacacgcgtcaaggtcaggggtgtgcatctgccccagacacagcaataatggcttctaatggactgtaaacaggtgaagtttgctgcaaagacattgctgctgctggaacaataaaagcttctttcttcttaaccctctcctggattttgattatgccacaactacactgtctttaaacagggccttctccaaagacattcttgcctggaatctcatccacccttatcaacaagaaggttattattagtccacctttcagccgggaaaactggggcccagaaagggaaacagacttgcgtgaggtctcagacctatgatgaggcacaaccacaagtatgacttaaggcttggttggtcttacagcccaagctattaaccactactctaccctgcctgcagctactgatgatttgcgctggactttgctaacagatgtaagagagataaaaagtgaccttggagctcagaggtctggagggaaaagtgaagatctttgaatcacactaaccagagttcagatcttgatctctttaacttgctgcgtgaccttgggtccattaattaacctctctgagcctcagtttccttatttttaaagtggagcaataggatgattgtgagcattgaaagaaattagatgcatgaaatgcctggcacagaggtctcagtaaaggttagtcccctctcctacacccactccccttgagtaaatctgggatatttgaaacttcctagaggaggtgatcttagcactggggctgccagatgaaaaccagtgatccaggtcccagagcccaccccacttctcggggatgctgtccccaaggtcctcatgtgccaggcaggcagccagcagccccctctccctccctcccagccgtgggctggcgggcaggagtgaagacagtgaggaccataaacaaggccaatgagaaagcggtaattccgcggcgccaccatttcccatcacgctgctacttttagtgccgaggcagggaggttggatggttcctcccctgggccattttttctgagcctgttagacaccaggcagggaggtaaggagagtgagggtaagggagagtaggggaggagggagtgggacttcaccttggcctcacccaccctccacccagccactctgcgactctgtcctttcacccgctggctggagagcgcctcctcttcaatcaccttccccggtggaccccagaataggaccttcaccctctactgtgaactgcacctgaggaccccaaaataggaccttcgccctctactgtggactccacctgaggctcacattcctgccctcatttccatccccactctatttctctccagagctcttgtcaccttctgacatgcttgaaaattgatttacttacttttttgttgttgtctgtttctctccagcagactgattctccacactaggctctctgagggcagagatttgtacctgttttgtttactgctctattcctagcacctaaaacagtgcccagcacgtagtaggtgctcaataaagtacagaatgtggttatccactcatccactcttattatctaatatttcattcaaaacacattgaggtgaataaatgaagctacctgttctgggcatggggttaagtgctggtggaatctaaatgaaccgcacagcctcccctttgaagtggggggatctgcagtgaagtggtgcaatcgtggaattacgattactgatcagagtcaggatgcctgagtttacttggtgtgtgaccctgggagagatttctatacctctaagcctctgtttctcaatctgtcaagtggggatggtcaaaggggttgcaaggagcaaggagaccctgcattcaaatgtgctttagcacagcgcaggcgaccaggggagctccatggacgatggccacggaactgcgatcactactacaacacagcccagaatgaaagcaagtaagcaagtgctctaatggagaaagaaaccacgtgccgagggtccgcaggaaaggagcaagtgatcctgctgtggaaggtcaaggacacagtctcagaagcagcagcacaggagctgggcatcctggagctccagcgttcttggtggaggaaatggcagaagcaaaggcacaaggtgtgggaggagctgcaggatccttgtgtgtgtgtgtgtgtgtgtgtgtgtgtgtgtgtgtgggtctagggtaggagatgaggaaggagaggagatggggagggaggggggtgagatcaggggatacttaaatgctggagggaggaatttgaaccctgtcccagaggtgtgggagccactgaaggatttcgagcaggggtggggcatggcccactgggatttaacatgtctgtctgaggtggcttggatgtggggacaggaagcggaaagggtagctaaaagggggctgatatttcaggtgggagatgctgaagcttatacagaatgtcaaggggggaactgggtgctgaccatggcactcagacccacactccctgctgatgggcagaggccgcctgtcttgcccacccctggtctccaagagggttccagggaagagcagggggacgaaaactcagggcctatgtccctggtccctcctgaaatatctctgaccctcaaatcccccagccattcacctatcctgatgggtgaaaatcccagctcctctaccacccaatggtgtgaccttgggcaagtcacttcacctttctgggcaggctcctttatgtaaaacatggaaaaggctgagatgagaataacccctgagtccctactctgtatcaagccctgccactcatagggggaaaaattctaagtgaaacctccagaaggagcctggtaccctgagggggttcagtcaacatcctcccgcctttttatcttagcacttcaaggggacctgctctgttttcaatgatgctctggcatacctggccaacgagatcaacatcttataaacaggactttatagtttatgcagcaccttcaaccctattatcttactggaagctctgtcttagaggaatgttaggttccattgtatggatgaggaaactgaagtttagagaagttaagcaactctcctaagatcacgtagggtttgaacccaagactattgcgtccaagcccaaagggtttcccctccagccttgccacctccccagtcgtgtgagtttcctgaagtcaggaccctcttccgtgattggcttctccaaagtacctcccctaagtgtgtgtgggaacaggcagacagtgcccctaggatccacctgggattgtagatacctgctacgtaccacatttctcatattccttctctctgacctttatgttggaccccgtgagttgcaactcattacctccatttcacagatgcagaaaacaaggcccaaagttctgccagctccagggggcagggctcatattaaagcccaagctgcctgaatcccctggccaagctcttcctccgtgggaggttgttggccgagctcaccaggatgccacagtcagtgagggaggaatcgcagggcagagacaggctgtgcacacagccctgtgcttgggtaactgatggtcagcatctccaaaactttcctgtggcgcacctttcaacccctgagctgaccccctctttctgcacgttgctggcacaagtttggatgaggctgggagcctgcctgagagggcttgagaacacctgaaccacccgtcagcctcagcagatctcatgggagctgagggttggaccttaccctccactaagagatcttctggtgttgcctcctggttttgcagaaggggaaacagtagctggagcaactttactgggcaccaggcattttcacactcattactgtttgagttctcattattttgcaataatgcacaatttatgagtgaggaaatggaggctcagagaaggaaaatgtcttgacctggactccaaaactaatgaattgtgagacgaagacacaggttggcccaagctagctggctgtttccatcacatgaggacacaatgggaaatcagcagtctgtaacccagaagagggctctcaccagaacccggccacgctgacacactattctcagacgtccagcctccagaactacgagaaattaatgtggctgaagctacctagtctatggtactttattatagcagcccagactgactacagcagtcagtcaataacctggttgtgatactgtactatagttttgcaagacgttaccagtcagagaacctgggtaaagggtgcatgggatctcaaatcccagtgctgctcctttctcactctatgaccttgtgcaagtcacttcacccctttgactctcagtctccttatttgtaggaaataatatttgtaggaggtaaaatactagccatttagaagtgaaaggcaatgagagtatgtcatttccaaactgatggcatgcaggcatagtagtattcagagggaaatttatagcctttgatgcacttatgagaaagcaggagtgattaaatataaattaattaaaatttcagttcaagatactagaaatataacaaagtaaatactagaaatataacaaagtaaattaaaagaaaacggagagaaggaattttaaaagacaaaagcagaaattgatgaatcagaaaacaaaatggagataatccctacaacacagttgtggcaagaattaaataagatcattcattcatttgcttgcatactatattccaggcattgtgctaagtacaaggggtataacagtgagcaaaacacacagccctgccctcatggagttttcagtctaacgacagaggcagatacatgagtaaatacagtacaatgttcagtgaaatcaaggcagaagcagagggcattgtggggtctagcagaggtgccctgacccatcctggggagagggactgttccccagaaggaggtgtgtaaggtaaacatgaggatgaacaaggttattgttattgagagtgttcttgaccaagaaaatagtacatgccagtgtttgatgcaagggaagttgtgtcgaagtggaggaaatggaagcattcctgattttagtgagtacttccaacaaccttgtgaggtgaggatgatgatcacctccattttatagctgaggacactgaggctcagagaggttcattaactggtctcagatctttcagcaaataagtgatgaagttgggattgaaccagatggcttagcctgggtttcctaaaacacaaagtctggagcaaagtgtacatattttatggcaggtgcaattcttaggcagcaagaataagggggacagggtggcagatagagaagaataggaagcaaacacaaagagctatgtttctgagctggccgtagaaacatacctttttgagccaatgcaactgggtgctgggtcacttggagtggcagatacgcaagccatgtggaacctcccatttttggaatagtccatttgtctgcggctccttcctggttcatggttgtcaatgttcctgatttgctgcaaggagtgctgttactcagcccctccaggaagccactagggaagcctgatcccctgccctaagcatggtgctttatctgaatgtgaaagtggtggaaagagcctccctcagatcgagttggacccagggggtcagctgctgcagcttgacaggcttgatggggtgtctgcagaaggctagtcctcacccgggggaaactgaggcagctggactagaagaagagccaaagacagcagccgggctcttcattgagcaagaggggacaggtggatcgagtcaatctgggacgatacacgagaccaggcctgtctgattacagaacttacacgcaagaggccaagctaaggctgggaaggtgggcaggggccaaagtccagagggcttattgacagatggaaatatggggctctgtctgcagggtaatgaggagccatgggaggattctcagcacctggcagggtggctggcaccaacggcaacccaagagaagctagatcccactggcgggcgtgcgcccagtggcctcatattggcagggtgtagggggctgcccgtcacccccctgccctgccacttctccgaagctcaggtccagaggctggcagtgaggtgctgcccatgacaactgcagcgctcatccttcagcatgacattggcacatcactgggggagtggagggtgacggagcaccattccgggtggtaatggctccagcgccaggaggaaaatgacataaataatatcccattagaggcgccgagcggctccgctgagtgccttgtgttgctggcaacattatgggcttcataaacagactcattcattttccactcgttgctctggtggatgggggatgggtgggctgccagggaaggtgactgggggctgcagaggcagtgaggggcaggaacagcacagtccgcccctccaagcctcaactcgcatgcctccagcttgggccaccagacttgctggccctgtccacctctagacttttgcccacacgccctgcctctgcctggaacacgctctccccagctcagtctttggaaaccacactacttctttcagggactaactcaggttgctccttggtgctgggttctccatgcagctttccttaattcccaatccttatttttattttattttattttattttattttattttattatttttttgagacagagtgtcactctgttgcccaggctggagtgcagtggtgcgatcttggctcactgcaagctccgcctcccgagttcacgctattctcctgcctcagcctctcgagtagctgggactacaggcgcccatcaccacgcccggctaattttttgtatttttagtagagacggggtttcgccgtgtcagccaggatggtctcgatctcctgacctcgtgatctgcccgtctcggcctcccaaagtgctgggattacaggcgtgagccaccgtgtccagcccccagtccttatttttttattttattttgaaatggggcctctatcactcaggctggcgtgcagtgatgcaatcacagctcactgcaacctctacctcctaggctcaggtgattctcccacctcagcctcccaagtaactgggactacaggcacgtaacactatgcctggctaatttttatgtttttagtagagctgggtttcagcgtgttgcccaggttggtctccaactcctaggctcaagtgatccacccgccttggcctcgcaaggtgctgggactacaggcatgagccaccgtgcccagcccattctccatggcctcgaggctcccttagctctggtgagacagcctggcacactggagggcatcctggagacagacaactctggattcaaattctgagctggcaattataagtctggtgaccttgggttagtcctcgaatctctctgagcctcagcttcctcttgtgaaaggatatcttgtgagagtatcttacaggcttgtcatgaaaagtgtcttttaggcttgtctggaacacagttgattttcataaataattgttctgcttgtcccctttactatgtagacatttgagttctctccacaaagggaccattgattttcttgtgtctgtccctcctggagtctagtcctgggctccgtgcatggcaggtgttgaaggcaggtttgagggtgcagtgagaggagctctgggtaaagaatgtagggccccgggtcttgtcccagcttgaacattgatgagctgtgtgaccttgggccagtcccttcccctctctgggcctctttctctgcaagggtaagacagaagtttacataaaaggacacctgtggcccttctcagctaccacttagaggacctcaggctagtaccccatccctccacctgtcaggaggtgggctctggctttcaagtcagagagaaacaggctaggatcctgctctgctgtgtggccttgagcaagaacagaacatctctgaatctcactcagtttccttgtctgaaaaatggaggtaatacagccagcattacagggtggttgtagtaacttagtgaaattattgaatcagtggtattcgctgaacacttattatgtgccaggcactattcactgttggggatacaatggtgaacaagataaggattattctcccccttcccagagcttatatttaagtgagagagagagagacaaaaatcagccatcacataaataactacataattaccaaccgtgctatatgttataaagaaaaagtaggctaggcatgatggctcacacctgtaattccagcactttgggaggcgaaggtgggaggatcacttgagcccaggagtgcgagcccaggagtgctagaccatcgtgggcaacatggggagatcccgtctttacaaaaactaaaaaattagctggccatgtggtttacacctgaagtcccagttactcaggaggctgaggtgggaggatcgcttaagttggggaatggtggctgccgcgagttgcaatcatgacactgcactccagcctgggaaacagagtaggacactgtatctaaataaagtaaaataaaataaaataaaatggaagtacagggtcctgacctagtgctcctagttatggagggcttcctgggaaggtggcacatgaactgagatcttgttctgattatttattgctgtataacaaatgaacctagtagcttaaaactacaatttttgttgatgcttgtggtttctgtggatcagggattcagaagggctctgctgtgcagctctgactcagggtctctcatgaggtttcagttagatgatggctggagctggagcagctggaagatgctggacatctctttccttctctgtaggtgatctcagggattctccatgtggtctttctgcagaggccggcttgggcttcctcatagcatggcatcctcaggacagtcatgctgcttaaatgtagcttagggctccagagccaatgtccttgacctccttccagaagtgtcccagtgtcacttacatggcatcctattggccacaaacaagtcatagcctgccccaaatcaagggaagggaacacgggccccacttcttcccaggacaagtctcaaggtcatattttataaagaacacgtaagataaaagatgctgttgtgcctatctttgcaaaatatgccctgccatagatctgaagggtgagtaggcgttaaataagcagagaagagagttccaggcaaagggacagctggcacaaaggccctggggtggaaagaatgtgtggttttgtactgaggaagcactcagggacacagtagtgagtaagacaacaacccataacgtttggagcttccattctagtgggagagacagacaataaacacacaaagaaacaaacaacacaatttcaggttgcaatcagtcccagaaagggaatacactgggtgccgtgacagagtgagattgggaactggagtagtacttcaggctggcaagacctttctgagggggtggcaattgagctgagagctgcagatgagagggagctggccagccacgcaaagggctggggaagagtgttcgcatccgagggaacagcatgtgcaaaggctaagaggtggaaaagggatgggtggcatggttgaaacttggtacgcaagggggctggcaggtgtgacataaggatggacagggcgggagaggccaggttttgcagggctctggcaaggagtttggacttatttctaagtgtgacagggagctattagagggttttaagcaggagagtgatgtgatctcattttgtaatagagatcctctggctgccgtggcactgacttctgggcgtgatgccagacttccgttcctggcagtaccatgaatgtgctgtgtgaccagaggctagtcacttaacctctctgaactgtaaaatgtgaagaatggaatatagtgggcaggaaggagggaacccagggagaaggctgtagcatcatccaggcagagatgatggtggcctggaccaaggtggtttcggtagagttgttggtaagaaatgggtaggatcacgacagactgggaggtagaatggacagaacctggtgattggatgtggagcatgagaaggaggaaagtacaacccccaggtttctggcaaagcttaatcttattttacagctcagagaggttaagtgactagtctgtggtcacacagcacatccatggtacccagaatttagtgccaccctctggtactgatactgagcccttggcccttttctctgtgtctcccctgccctactgccccccatcacctccccttcttcctcccaggatgctggtggctctggttgacgcagtcccagcaggtgtgcctcgccaagctgtcggcatgatgaacagcttcccttggctgagcagataacagtacacacacaggtcgggggggcccatgtagcccatccatcaggcccgggagtgagtggagggccggcacaccctcatgcctgttatctgccacaaatgtgtttttctccccaaggttaacaggaagagtgacagccaggtgcctgacatcagcagggctggtgttcgtaggagccagccagactctctctccttttctctccctcagcgtctgaagagtcctgggtgtggagacgcttagagcctcagaattgcagactcttcaagtcttgagcactgaatcttcgaaacttagatgcgtacaatccttcattccttgaggcaggattgtgtggtggttaaaagcggggactctggatcccgcctaacctgattgggttgacatcccagttctgccacttactagctgtgttatctaaggcaaacacctcagcatctctgtgcctcattatgagggtggtaatagtgtaatagtgtctagaccacgggtggccgtggggattataggaactaatctttgtatctaaagtgcttagaacaatgcccggcacagagcatgttgctcatattggtagatatagagttcttaaagacacagaatcttcaagtctaagttttagagacacagaactttaaaacctttgaatcttcttagggccacagattttcagaatcttactattttaggtgattatggtcacacctgcagtggcagctgcaggggttttaggcttccataatctctgtcacttctttctcatttcattcacatgggcaatagctagtttctcaatcttatgtaaagtgttctgcaaatatggtggcaagcccaccttctaggcagattgtgggccccacatagaaattctagagtgtctactgcacaacacctcacagtctctataaatacgtttatctaactatctacccagtccatccatccatccatccatccatccatccatccatccatgcatcccttcatttatccatccatgcatcctttcatctatccatcttcccatccatccatctatccactcattctatccatcaccttctcacatctatcaatcaatctattgtctagccatctatatgcatttcccatccttccatccatccatacatccatacatacattcttctatctatccatcttttcatccacccattgatccatactttcatcatccatctgtccatccatccatccatatttgctcatccctcctcccccatccacctatcccatttctctctctctccttccttctttcttcctttttaaaattttctcatccttccatctatctgtctatctattcacccaacacttattcacttattgagtgtctatagcatacaaggtactggattgggctatagaaggaggtctatgcattggcgtcagtttctatcttccctgagcttccagtccagcaggccatagaagacccaaacacaaacctgataatgcaagcttggctctatacagcagagataaaaagccatgctgagtgacagaaagggaattctcctttctgctggggcccctggggcagcttcatagcagaggtggtatttcatcaggatctcgaaagaccctgtcttgatgacattacaagtggcttcatctttcaggggactgggaagagaagcctggggagccttaaacaccatctggttcacctggatgaccactgctaggaggtttgcttccatttttttttcaaatttaatatttttcattttggtttagtgaaggggaccaaatgaaaggaggttccctttaaataccatgtgaagaagtgctgcaatcccttcttgcacacctccagggctgaaaagctcactaccagacaaggagaaaggcctctagaactctactgtgctccaggaactgaaaggcacaaagggctctgtttgatcttcctgacccccaggaactgtctattactgttatctggggggttgggggtaggaatagtgctctggacccagtgtgtttggctcacatcccagcttcccattcatgaactgtatgacctggaacaggttacttcacctcccaaggactcagtttactcatccatagtacggtgatggcaattagaatacctctcatgggattgttacaaggatcaaatgagctaacacattcatgatgctgagtgaatgtttgtgaaattattgctattactgttttaggtggttgtattagtcagtgttgcatcaggcagctcagtggagagcatgaatctagcaaaatcgtgacagtggtttggaagagttgaaagtgcagtggctggagattatcaatagcagaaaagatgctacagaccatattcaccatttgacgaaggcatcctctttggactagtgggtgctgcacaagtaaatgggatgctgtgagagaaagaaccccaagactggaggaacaaagacaggagtgattttttttcaagacaggtctccttatgtcacccaggctggagtgcagtggcgtgatcacagttcactgctgcctccacctccaggttcaagcgatcctctcacctcagcctcctgaacagctgggactacaggcatgcaccaccacgcccggctagttttttgtattttttgtagagatggggtttctccatatgcccaggctggtctcaaactcctgggctcaagcaatcctcctacctcggcctcccaaagtgctcacaggcgtgagcctccgtacctggccaaaagaggaagcaacgttacaagaaagagcccaggagttggggctacctagaaggagttggaaccacagagggagaggctgcctttccaaagactagaaaccagggaggagatgcagctagtggagaccttgccctgagtagagggagcagaaaaataccctgcttctccctccctcctgccctgcagtctgtatgcactgtcatctagggagacaaatcagagacaaggaggcctgctcacccagcttgcagagcccagaggatcatttcctagggtatgttcctcatgatcctattctgcaagatacttcttcagaaaaaggtttttaggcaaatcaggcttggaaatgctgtaggcaagaactctgtcccgcagatctgccaggcatgttactacagtgaagacgagcagcaacagagttaaaaagcccaggctctgtagtcagactcagttccctcctctatcaaatgggaatagtaacaatatgtactttacagggccatttattcatttgttaatttattcattaattgagtagatacagtgtgtcagtctccagggatatgctggtgaacaagacagacatggtgtcagtcctcaagaagcttacattctagaggaatataagctaatgaggtaatgaatgtaaagtgcttagcacactgcctggaatatagtaaatgcccaataaatgccacccttaaaggctctgagaagtcctgcaatggatacatcttaaatccagggctttccaaacatatctggccatgaaatctgcctcttttccccccaatagtaccctattcctatgctgcagcactcactggtccaaagaacatattttagaaatgctaggtgggcagatacggtctatacacatacttatacacagagacacacaaagatacaaatatcaactacttctggtagctaatgaaatattaatagggctttgaagaaatgggaatagctcatctcttgtttcattttaaagtgaccacattttgtataaatcttgtcttggagggtagtaagtggaattcactttgatgagtttgttctgaaaaatacggagtcattaattaattgatccactcaacaagcatttacagcagcttctgtcattctgtgctgcctgcgtggcactggggacacagtgattctaaggcaatgtgtaggatcaagatacgccctgtatattgtggcagccccaaaagaggccgcctatgaccatctgggagggcttccaggaagaggcgctatctgagttgagtctaaaaaggtgaatggaagtttagctaggaaagggagccctgtagaaatgggtattcactgttcttggccctgactccttagggtcagagtcaattttaggtccaagaagggagaagatggtctggcccccagtggtttcttctctacttgtgctgggggcttggggggtcatgaaaggagcactgggctgggagtcaggcagcccggggagcaagtccagtgtctgtcacccactaccatgcgaccttgagtaactcactccctctctctgagcctcagctttctcatcagtgaactggggctagcagagcttacctcactgggctgatgtgaagagcaggggaggtgatggatgaggaagtgctttgtaagctgctgagtgctgtagactgcaaagctctatgtatatgcaacacgttggctgcatgtcttggctcaagacccagttcgcagtaggggcagaaagaattgttgaaccaaattcttctgccaccttttgggttctgttcctctggcttttgaaatcgttttggtcctcctaggtcccttattaatataccaacactctgaaaggtgttaatccttattagctaatatcttagtgctggcactttcattagcagttaacacctgtagttagcagctaactccttaacgggaatcatctggcattcatctgcgagaagaactttcaggaatggggccaggaggggctcttggtggtcttggagcacaagggggctatgagagaagaaaagactgtccaggagagacatctctgacagagctattttgccaaaggaaaattccattacctgtccactagactgagacccctagagaatggtaccctgaatcatctctgctgccttgtctagcagagaggctttgggcaaactacttaaccattataagcctcaggttcctcctctattaaatggggatactcaactatacatttttgggtcaccatggctaatgctatgtttctcaaatttgctgtatatttgcaggtggtacataaaatttttattttaagagtgaaacttttttatccatcaacttaaataaacttatgctgggtatcaaatgaccttcccttaaatctcaatgactttcaacaataaggatttattttttgcacatgctacttggccatcagatagctttgggtctgccttgattctgctccacgttgtcattctgggaaccaatttgaaggggtggccctgcctagagcgtgctagtaacacggcagcagaaggaacaacagcagaaccccacaatggctcttaaagctcccattcagaagtggcatccaacagttgtgctcaatttcattggccaaagcaagtcatatggccagatctgatggtgacgaggtgggaagcatacacctttgcagggaggcacctggtaaggaggggccgtgagtattgttgaataattatacaatctagtgcagtattgattttcatgcatattagaaaaataggcctgtaattccagaactttgggaggccgaggtgggtggatcacctgaggtcaggagtttgagaccagcctggccaacatggagaaacccctgtctctactaaaaatacaaaaattagctggatgtggtggcacacacctgtaatcccagctacttgggaggttgagacatgagaatcgcttgaacctgggaggcagaggttgcagtgagataaggcagagccactgcactccagcctcagcaacagagtgagactctgtctaactatggggcatgttggctcatgcctataatcccagcactctgggaagccaaggtgggaggatcatttgagttcaggagtttgagaccagcctggccaacatgatgaaaccccatctctactaaaaatacaaaaattagttgggcatggtggcaaacacctgtagttccagctacttgggaggctgagacaggagaatcgcttgaacatgggaggcagaggttgtagtgagctgagattttgccactttgctccagcctgggcaacagaatgagactctatctccaaaaaaaaaaaaaaaaataactatacatatatatagtacaaatatagagagagagcaagagagagagaatgataaaacaaacatggcagaatgcatacaattggcaggcctgggtctcggctccctgcaacctccacctcctgggttcaagcaattctcctgcctcagcctcctgagtagctgggattacaggcatgtgccaacacccctggctgatttttgtatttttagtagagacggggttttgccatgttggccaggctggtctggaactcttgacctcagcaatctgcccgccttggcctcccaaagtgctagggttacagacggatctgatttcttaaggtgaggcaaaggtagagagaataaaaactagttgagctaatttaaagaatattaaataacagtagccaggtgggacatttggcaaagtgggactttcacctcccatgaggcatttgatgttcctcacacttcatcggggtcctctggctggcagcccccttctcattcattcattccatacccccttattgagcacctactgtgtgctaggcacctgttgggcactgaggagtcaatagtgaatgatacgaggcagacacaggtcctccctggagaggctgacagcctcatggaggtgttgggataggaagacatgcagtgagtggtctagggagccccgtgccagctgctattgtccctgtggggaaagacaggctgtctagtggctcaccactggcagttggtgttgggggaaccatcacatgctatacctcctaacaagggacagttgtgtcactgggcccacataacagtgtctctgtgtgagcagggggcagggagcagatgggcaaagtcacagtatgcactgaacaccttcctggatgcttatttgttgccgaaatttgttgtcatgggggctgaataacttattgtttttatattaaaagaaacagaaggactgggaaggggcacaagagcatgttttaggatgattaaaatgttcactttcgtaggctgggcacggtggctcatgcctgtaatcccagcactttcggaggccaaggcaggtggatcacttgaggtcaggagttcaagaccagcctggccaacaaggcgagacctcatctctagtaaaaatacaaaaattagctgggcatggtggcaggtgcctgtaatcccagctaattgggaggctgaggtaggagaattgcttgaaaccaggaggcagaggttgcagtgagccgagattgcaccactgcactccagcctgggtgatagagtgagactcggtctcaaaaaaatttttaaaaagcttattttcttgatcatggtggtagttccatggttgtataaatttcaaaactcactgaaatgtacactttaaatgaatgagttttatcatatgtaaattacactccaataaagccgatttacaaaagaattttttacaggagtatgaaaattatacattattttggagaggctcagagaagttgagtaacttgcccaggatcaaaaaactactgacgggagatgaaggaaaagagacccgggtgtgcctgaccccgggattaactacaattggtacatgcctttcattcatctgcataaaaaaaagcgacttccattttgaaaagcaacattctcaaacagcatagaatctaccctagtcataaagatttcagaattagaagggaattaagtggcctcagagttctgtctccttcctcctctgcccaatgacacacatagaagccctgcccttctctttggccttgattgacctctgagtcaagcctttgagagtcaccctggacacttccatctattgttttttcttttttttttttgagatggagtcttgctctgtctcccaggctggagtgctgggattacaggtgtgagccactgcgcccagcccacttccatctattcttgtattcttgtatcagttaagcctccctcactctcagcctctgtctcctcttttctgccctggccctggggtttcggaggctcggcccaccttgtcctaccccagctaaacatctttgtgtcacccttgctgtttattcttccacagtctgggagaccaggaggggaccctttgatctgggtgggaagcagggaccatttgagagggtttgccattgacctactttatagatgaagaaagaaggctcagagaggtagaggacctgcgtgaggttaaacagtttgcacgggatagagcctgaacccacccagatctgtctgattccagatcccaggcccttacccagaaagatagtaggaggccaagtcatgaggctgagggttgggtcgggggaaggcagagggtgtgagaagtctctttcaaactcccttcattccagaatcagctctgtcaatggcttagaaaaccccagtccctgaagggacagggctgccagggcctcttgccgagtgactgcagaccacatttttcttaatcttaattgaaaactgttcaagtagaaaaatcatttcactgcttcatctcagaaaggaaaagaagaagggagaagggagggctcgggttgggttgggggatggaggatttagccagagaggaaaggctgtggctatcgagggcttggtccctacctgccctgggcctgccactaggccttgcccaattgggcctccctgagccccagggcttggggggttgggtctgccgggctactgatgcagtcagtcataagtacgagggtcccaccatgtaccacgcagatccttggccgggatcccagaacaatgaaacaccgtcagatgcagctcctagggcctgggaactaggggcttctagttcctcccctcctcctcttcctctttcattcattccttccctccttcaaccaatatttattgagcatctgcaatgtgtctgctactgtttcagaatatacaaatagctcctgccctcctggaatgcactgtctagcagggaaggcaaatcatcagataaatagagaataacacactgaatttagctctgaagaaacggggagagtggggtgagcaattattctataggcatgggtgggaattgtgatttaggctgagcagtcagggagggtctcctggaggagatggtattacaacaaaggcacaaagggtgggtaggagttatccaggcaaaggcagaggtggggtcagtggtgggagtgggatagcacccccaggacagagggaggtgctggaaaggctagactcttaagcaagactgattgggttcaaattccagctctgtcactagccagctgagtgatcctggaacaagttaactaacctctctgtgccttaattttctcatttgtaaacagaggattattgtgaggattaagtgggtttacatagataatatgctacaatggtgcctggacagcactattgtaagcaaacaaaaagccccagcctgtgcaaaggcactagagcaggcaactgcaaagtaagtcatcgaagtcaacaaaggaacaggctttatcccagggcaaacacagattgggtacatgccgtggaaatccatgctgtgctccagaaaaaatggaggctaaaatcctgtatctgccgggtagtcagagcaaacctatgttggtaccttctacccctcttttcatggcatccctgtaaccttgggaagaatccttggttatcctcactttacagatgagtgcactgaggctcagagaggccaagtgactagtccaaggtcaagcaggtggggctgagcccaggtttggctacctccagagcccaagtctcttaccactgtgctctactgcctcaattttgagatgtaacaaaaatggcatcttatctaggtttgactatttgttgagcacacgctgtgtgttgcatcttgggctacacgtgccacacaggaagcaatttataagatgcaggctaggtagggcagtcatacaatatttttcctaaactgagtcactttggacggtgaaagtggcactcttccaggatggcatgtgtcaaatggaacctagggtcaccccaagcttggggcaggtgatcaagagcatggaatcaggtagacctggctggcttagtgcccttgggcaagtcacttaacttctctgaacctgtttctccatatgggggtaacaatccctagctcctagagttgtgaagatcaaatgagacaatgggatgacaaatactaagcccagtgcctggcatggagtaggccttcagtgaatggtagacattattatgtaatacacagtcagtggatttccctctgtctgtctctttacccatctccctgtttctcaggttttctcctccaatccccttaccccttccaggacccaggtctaatctgatttgctgtgtgtccttgggcaaaaatctcttccattctctgggcctgctctctccatccagctagaatgcttcaacaaggctgctggggtcccatctctcccccttcctctcttggctggccttgctaccctgccatctatccccaggctcattttacaggtcagttccctttaatgagcagggctcagagccttttccctcacaaaatggaaactgcgggttcatcaaaatctcattaacctccattctcctggtgggcctgcaggggtcagacctgtctcagggtggcggtgccacctcccagttggcaggctccagggctgtctggggctagcggtgggtggggctactggtttgctggttccagacaatattcatgccacaacatccagtcctgccaaccttggccacctggaaggaagaggagagagggggccttcagcactttaatttgaaaacttgccatgggaccgagggatgttgggagcagaagagaacggctggcttctagtgaattaatgctttgcttgtaactggtaattttctccactttcatgtcacctggctctttcttcttcttcttctttcatttgatcttacttggaagggtaatgtggcccaccactgtctcctccatcatggtcctaatttttcatctaggacttgtctgagcctagccctgctcatgtgcatggtctctggaggagcttggtagtgagggtttctgggatcctctcactaaccagggggctgtgggaaagttgcttaggctctcttagcctcacttacctcctctattctgagaataaaatgagataatgtatttagtgcctggcaaccactttgaaaaacatggtggcagtttcttctaaccttaaatgtgcacttatttagtcgagagaaataaaaacacatgtctatcaaagatctgtgtacaaatgtttgcaacagatttattttatttattttttttgagagagagtttcattctctcgcccaggctgtggtgcggtggcatgatcttggctcactgcaacctctgcctcctgggttcaagcaattctcccgcctcggcctcccaaagtgctgggattacaggtgtgagccatcacgcccggccataacagctttattcataattgccctgaactagaaacaacccaaaggtccatcaactggcgaatagatcaataaattgcagttcgaccatatgttggaatactaggtgcagggaaaagaaacctacgactgatgtccacaatgacatgaattaatttcaaaagcattctgtaaagtgagggaagcagactccaatggctaaataccaggtgattctgtttaatgacaacctggaaaaagccaaactgcaggcacagaaatgaaatcagtggttgccaggggctagggaacggggaggggatccactgcaaaggggcacaggcaactttctggggctagagaaatgttcaatatctttttgttgttgttgtgtctagagatggggtcttgccatgttgccgaggctggtctcgaactcctgggctcaagtgcaggcaggagggcagtggcacgatctcagctcactgcaacatccacttcctgggctcaagctattctcctgcctcagcctcccgagtagctgggattacaggcgtgagcctctgcacccagccaaatattcaatatcttgattgtggcggtgagtatactggtaactatgtctttcaaaactcacccaagtgcacactttaaaaggatgaatcttattgtatggaaattacatcccagtaaaccttactttaaaaaataatgctagccagtaaaactgtcagttaattttaatttttttttagacaggggttattagtccattttcatactgctataaagaactgcccaagcctgggtaatttataaaggaaagaggtttaattggctcacagttcagcatggcaggagaggcctcaggaatcttacaatcattgcagaagatgaagaggaagcaagccaccttcctcacagggcagcagaaggagaagtgccaagcgaagggggaaaagccccttataaaaccatcagatcacaggagaattcactcagtatcacaggaacagcatgggggaaccacccccatgattcaattacgtccacctggtctttcccttgacacgtggggattatatggattacaattcaagatgagatgtgggtgggggacacaaagcctaaccatatcattctgcccctggttccttccactacatcattctgcccgtggctcctcccaaatctcatgttctgttcactttttgaaaccagtcatgccttcccaacagtcccccaaagtcttaatttattccagcattaacccaaaactccatgtccaaagtttcacctgagacaaggcgagtcccttctgcctatgagtaaaatcaaaagcaagttagttacttcctagatacaatggggatacagacattgggtaaatacacccattccaaatgggagaaattggccaaaacaaagaggctacaggcccattcaagtctaaaatccagtggggcagacaaatgttaaagctccaaaattatctcctttgactccatgcctcacatccaggtcacactgatgcaagagatgggttcctacagcctttggcaactccatccctgtggctgtgcagggtacagcccccctcccagctgctttcatgggctggtattgagtgtctgtggcttttccaggtgcatggtgcaagctgtccatgcatctaccattctggggtctggagaacagtggccctcttctcacagctctactaggtagtgcaccagtggggactctatgtgggggttctgacttcacatttcccctccacactgccctagcagaggttctccatgagagctccatccctgcagcaaacctctgcctggatgcccaggtatttccatacaacctctgaaatctaggcagagattcccaaacctcaattcttgacttctgagtatccacagtcccaataccacctgtaagccaccaaggctttggacttgcactctctgaagcaacagcctgagctgtacattggccccttttagccatggctgggatgtagggcaccaagtcctgagactgcacaaaggagcaagaccctgggcctggcccatgaaaccatttttagctcctaggcctccaggcctgtgatgggaggggttgctgtgaagatctctgacacgtcctggagacattttccccattgtcttggtaattaacatttggctcttcattatttatgcaagtttctgtagcctgcttgaatttctcctcagaaaatggtttttcttttctatcacatcatcaggctgcaaaatttccaaacttttatgctctgcttcccttttaaacctaagttccaattccaaaccatctttttgtgaatgcatgaaaccaaatgcttttaagaggatgcaagtcacctcttgaacactttgctgcttagaaatttcttctgccagataccctaagtcatctctctcaagttcaaagttccacagatctctaggtcagcagcaaaatgaagcatagcaagagtgacctttgctctagttcccaatgagttcctcatctccatctgggaccacttcagcctggacttcattgtcaatatcactaacaacattttggtcaaaaccattcaacaagtctctaggaagttccaaacttttccacatctttctatcctcttctgagccttccaaattgtttcaacctctgcctgttacccagttccaaagttgcttccacattttcaggtatctttatagcagaaccccactctctgaggtacaaatttactgtattagtttgttctcacactgctataaagaactgcctgagactgggtaatttataaaggaaagaggtttaattgactcacagttccacatggattgggaggcctcaggaaacttacattcatggcgaaaggtgaaggaatcaagataccttcttcacaagtcacaggaaggataatctatgcaggaggaactgccaaacacttataaaaccatcagatcttgtgagaactcactcattatcaagagaacagcatgggggaagccgtccccatgatctaattacttccacctggtcactcccttgatatatagaaattatgggagttataattcaagatgagatttaggtggggacacaaagcctaaccatatcaacagagtctcactctgtcacccaggctggagcacaatggtacaatcttagctcactgcaacctctgccatccagtctcaagccatcctcccacctcagcctcctgaggaggtgggaccataggcgcatgacacaatgcctggctaattttttgtaatttttttgtacagactgggtttcactatgttgcaggctagtctcgaactcctggactcaaggaatctcccaacctcggcctcccaaagtgctgggattacagacgtaagccactgtacacagcctaattttaaaatttattttgctttttaaattgaggtatggtgtacaaatagtacactacaccataaagagccccaatcttgtgtatacatcttgaagactttttacatttttgtacatcccatgcagatcaatgtatgaaacatttccaggccctcttactccctcactccccatccaaggccacaaccctgaaagttaactaatattttgacatctctcaccacaggttagttttgtgagattttggatctcctatgaatagtcatcctgaatgtaattgtttgtgtttggctgttggtgaggtattgaagtcatcttctaaaaacacaaatcagatcgtgtcgtgtcttgattaagagccttccaatgtcttctcagtaagcttcaagtagaatcccaagcactctccctgcccgctaaactatgcatgtcctacccacaccatggaccagctgcgctggagtcctctccagccacacagagcttccttcagttctttgagcgctcccagctctttccagctgtggggtcttcacgtttgctgattcttctacatgcaatgaacttctgtgggccagatttctccctgtcctttgggtttctgctgaatggccttccccagactctaccccaatgggttcctgacttccactccttggttatttgccatctctgcacctgttggttcctctgtaaccctcatcatggttcacaattgctcctttgtttgtgggtcgattgtctttctccccgcttaggttgagagttagacaaggctaggtctaacctgtctgcatgatctaggtgcccagtccagtgctaggcacatgcacgtgcttaacacgtgttggctgaatcaatatatgaaccatccaattcagaatgtgacttctcatgcatcttctcatttgtttctcacaatatcagcaagggagcaaggtgtcatcagtgccctcctcagctgaagaacttggagaagttgaccaagcatggtggctcatgcctataatcccaacactttgggaggtcgaggcgggcagatcacctgaggtcaggagttcaagaccagcctggccaatatggtgaaaccccatctctactaaaaatacaaaactagctgggcatggtggcacatgcctgtagtcccagttactcagaaggctgaggcaggagaattgcttgaacccgggaggcataggttgcagtgagctgagatcatgccactggccactaactccagcttgagtgacaagagtgaaactccatcttgggggaaaattaaaaaaaaaaaagaacttggagaaggagaagttgatctgattgctcaggtcatgtaccaatcatggctgagctggaacctatcactcccttccttccccctttccacctcccgatgccagcagagcctgcctctggctctcacgcatcattctgtgctggtcattgttaaattagagtagaacttaagtaccataaaatctcaagtgcacagtttggtggatttttgcttaggtatacactcacagaacacccacctagatcaggatgtagaacctttctagcatcttagaagggatccttcataatggaccccttctagtcaataccatccccctcccaagggaaacaattattctcatttctatgaccatagtttaaagttgcctagttttgaacttcatattcatggactcgttcagaatgacctcttgtgtctggcttctctcactcaacacaaaatctggagtcatcatgttgctgcatggagcagtagcttgttttttaaatgccacatagtattccagtgtatgaatatatcacaatttgtttatatccattctgttgatgggcacttgagccgtttccaggttttgtcaattatgaataaagcttctgtgaacattcttttggtagacataggcacgtatttctcttgggcatatacccaggactgaagtggttgggtcattcagtgggcatgtggttagctttcctaaatactgccagacagttttcctaaatggttgtacttcatgcattctaggatcccagcagccagaaggttcagtgctgactcccctgcagctccagccttgctgagattgaagtccccatagccatacttccaccaggtgctgggacgctgagctaccctgctccattagcaatcatagcagggagaaggggctcagtgagggtagtccaacgctttctgctgagaggctggctggcttgctgagcccagcaaaggttaggtcactttgcattttcccctccaatgatctcagctcttaggggcaattagccctcagtagagcaaggagctcagaatactaaccagatctggcctagctgggagagcatttttttccctctgcctgggctgaggccctgccttgcagatggagaggctgagtggagagctagaggacgaaagcatcctttactactgaccatgtgcactgtgttagtgttttgggtcaccagatgctcttcagtgaggaaacgggagcagcatctggtgccaccctgctgatgtatgcctcaagaggggcaccatcactcctggttgctgtttgcttctccaggcagctctgcccatcacacaatatcctgttcaatgtagtactgtttgtaacagtcctaaggtgaaaataagctaaaatactgggcacggtggctcacgcctgtaatcccagcactttgagaggccgagacgggcggatcactttaggtcaggagttcgagaccagcctggccaacatggtgaaaccccatctctactaaaaatataaaaattagctgggtgtgattgcacacacctgtaatcccagctacttgggaggctgaggcaggagaatcgcttgaaccagggaggtggaggttgcagtgagctaagatcgtgcccctgcactctagcctgggtgacagagtgagactccatctcaaaaaaaaaaaaagaaagaaagaaaagaagctaaaagtccactggaagggactgatgaagtaaattacatgttacatcctattaaatatacaatggatgctctacagccgttatggacaggaataagatgtattaacatgacgtgtccctaatatgacaccctgagatgggaataatatcactcttgggttatgcttgccaaaaaggcataagcttaatctaattgtgagaaaatcagacaaactcaaattgatggacactacaaattaactgaccagtacttttcaaaagtgtcaaggtcatgaaagacaaggaaagtctgaggaattatcacagattggaggagagcatggagacatgacaatgaaatacagcgtaggatcctggactggctcctggaacagaaagagaacagttgggcaaaaacaagcaaaattccaattagatctgaagattgcttaatgatattgtactaatgttaattttctggctttgatgactattccatggttatataacatgttgacattaggggaagctgagtgaggaatacatgggagctctctgtcttttttatttttatttttagtttgtttttttgacgaagtttcactcttgtcgcccagcctggtgtgcaatggcacaatcacggctcactgcaacctctgcctcctgggttcaagcgaatcttctgcctcagcctcccgagtagctgggattaacaggtgttcaccacaacgcccagctaatttttgttatttttagtagagacgggcattcaccatgttggccagggtggtcttaaactcctgacttcaggtgatctgcccgccccggcctcccaaactgctgggattataggcatgagccaaagcacctggctgtagcttttctataaatttaaaattatttcaaaacaaaaagtttaaagtaaagatgacggtatagatcaggacttcttaacctttgccgtgccatgggccttttggatgaagcccatgaaacttttctcggaataatagttttaaacatataaaataagatgtttaagatttccgagaagaccaattatcttaaaacacagttatcaaaatattttaaaatttcttatgtagaaatatacatgcttcttattaatatattcattaacaagatgcagtggcaggtgtaataaccactgtaatttcaaagcggtgatgagtgtaaacagtatttcaagatagctgcaacaatgataatttgatacaaaaatatctacaatcactatggtagtgaagtcacagatactgttaatgctactgtagcttgttgcttatattcaaatggaaggaaatgagaaatttcagttagaatttagtgaaaatgagggtataattttttcccattcaagtttacagaccccagagttctatttgcagtctggcagtatctattacatccctgatataaatgtatatttattgaactggaaagaggctcataatatattagtaatggaggtgggggaagcaagttatcaatcaatatatacagtagaatcccattttcataaattaaaaatgtcagtgtgggtgtgtgcattgcgtattcattcaacaagcattccatgatcacctaccatgagccagactctgagaatataacaatgaagaagaaagacatggtttttaccttcccagagcagggcagctagaaacatgaataacttacaacacagtggtgtgtgattatttgttttttcttcttgttttgtttttttgagacggagtcttgctctgtcgtccaggctggagtgcagtggtgcgcttttggctcactacaacctctgcctccctagttcaagagatttttctgcctcagtctcctgagtagctgggattacaggtgcccaccaacacggccagctaatttttgtatttttagtagagacgaggtttcaccatgttgaccaggctggtcttaaacccctgacctcaagtgatccaccggcctcggcctctcaaaatggtgggattacaggcgtgagccactgcgtttcgcttgtttttttctttttgcttctgtatatttcctaattttttatgaacacgtattttggggaaaatattttttaaaccaaaggataaagctcgtctttatcccaagctgcatcctgtctgcaggtaacactccctattgcccctaggtctgccccctggtgtccccaaaaaactcatccccacttcggtgtcccaccataaccattaagatcaggcagatggcaacctacaggccttcctttctccaagctgaccacccccaggttctctgatggtttctcacccaacatcatttcaaatctttttaccgtctatcacggtgacctttcttgggacctgcccagttttttttcacattcctcttacagtgtggcattcagagctgagctccagatggagtctgcctcacttagattgcaaagagactatcacctccacccttccagacgtcatacttctatttatgccacctaagaaaacaatcatttttttaaacagctttatttacatataactcacataccgtatatattagttttctactgacgctgcaacaaattaccacacacttagtgacttaaagtaacacaaatttactatcttgttccatggatcagaagcgtgacacaaatctcactggacaaagatcgaggtattggcagggctgagtttctttctgaaggtcctaggggagaatggatttccttgcccttcccagcttctagaggccacctgccctcctcggctcgtggctcccttcctccatcttcaaggccagcaacactgggctgagtctttctcaagatgctgcctctctggttctctcttcatattccatcttctacttttaaggtcgtttgtgattacattgggcttacctgggtaatccaggctaaacttcctgtcttaaagtcagctaattagcaactgaattaatttcatctgcaaacttaattcttctttgccaggtatgctaacatattcacaggctctgaagttcaggacatagacatctttaaggggacattattctgtctaccacatcacacaattcattcacgtaaaatgtacaattcaatgatttttaatatattcacagggttgctggcaaccaacacgatcaggtttagaacattttcatcacctggaaaagagacatgcagcgattagcagccactcctatttcctcccacctcccccagccttaggcagctgatagtctactttctacctcatagacttgcctatgccaggcatttcatatgaatggaatcatacatatgcagttctttgtgactggcttctttcacttagcataatgttgtatcatgtagcagcactgtatccctttttattgccaataatattccactgtatgcatatatcacattttatttatccattcatcattgatagacaaatgggttgttcccactttttgactattgtaatagtcctataaacatttgtgtacaaatttttgtgtgagcatatgttttcatttcttttcttttctttttctttcttttttttttgagacggagttttgcttttgtcacctatgctggagtgcagtggcgcgatctcggctcactgcaacctctgcctcccaggtccaagtgattctcctgtctcagcctcctgagtagctggaattacaggtgcacaccaccatgcctggctaatttttgcatttttagcagagacggggtttcaccatattggccagactggtctcgaactcctgacctcagatgatccacctgcctcagcctcccaaaatgctgggattacaggtgtgagccactgcgccctgcctgttttcatttctcttaggtgtacacctaggattggaattgctgggtcatatggtaatgttatgtttaatattttgaggaaccaccacactattttttaaagtggatgcacaattttacattcccaccagcagtgaatgagggatccaatttcttcataaccatgtaaacacttgctatctgtttttttattttttaatttttttacttataaccatcctagtgggtgtgaagtggtatctcgtggcatcgatttgcattttcctcatgattaaggaagttgagcatcttttcatgtgcttagtcatttgcatatcttctttggagaactgcctattcagatcccttacccatttaaaaaactgagttggttattttattattgagttgtaagaattcttcatatattctggatatgttacaggaaaggggtcccgatccagatcccaagagagggttcttggatttcacacaagaaagaatccagggtgagtctgctgtgcaaagtgaaagcaagtttattaagaaagtcacggaataaaagaatggctattccatagacagagcagcctcaagggctgctgcttgcccatttttatagttatttcttgatgatatgctaaacaaggggtggattattcatccctccattttcagaccatataaggtacttcctgatgttgtcatggcattcgtaaactgtcatggtgctggtgggagtgtagcagtgaggacaaccagagttcactctcatggccattttggttttggagggttttggctagctcctttactgaaaactgttttatcagcaaggtctttatgacctgtattttgtgctgacttcctatctcatcctgtgacttagaatgccttaaccatctgggaatgcagcccattaggtttcagcctcattttacccagctcctgtttaagatggagttgctctggttcacacgcttctgacagatacaagttccttatcagatgtatgagttgcaaatattttcccccgttctatggggtgtcttttcactttctttttctttttctttttttgttttttgagacggagttgtgctctgtcgcctaggccagaatgcagtggtgcatctcagctcaacctccacctcccagtttcaagcaattcgccctgcctcatcctctcgagtagctgggattacaggtgcctgccaccacgcctggttaacttttgtactttttagtagagacagggtttcactatgttggccaggctggtcttgaactcctgagctcaggtgatctgcttgcctcggactcccagagtactgggattacagccatgagccactgtgcctggcctttttcactttcttgataatgtcatttgtattacaaatgttttttagttttgaggaagttaaatgtatctattttttcttttgtcatttgtgcttttaggtatctatgggcccattgcttaacccaaagtgataaagatttactcctgtgatttttttctaagagtttttatagttttagcttttacacttatggctatgatccattgtattagtctgttttcatgctgctgataaagacatacccaaaactgggcaatttactaaagaaagaggtttaatggtttcacatggctgaggaggcctcacaatcatggcggaaggcaaggaggagcaagtgacgtcttacatggatggcagcaggcaaagagagagaacttatgcaggggaactcctctttataaaaccatcagatctcataagagttattcactttcacgagaacagcacgggaaagacttgtcccatgattcaattatctcccaccagctcactcccacaacacatgggaattcaagatgagatttgggtggggacacagccaaaccgtatcattcactttgagttaattttgcatatggtatgagttaggggtccaatttcattctttagatgtgcatatccagttgttccagcaccctttgtgaaaaaggtgattatatcttcactggcacttttgttgaaaatcaattgatcataaaagtaagagtttatttctggactattgattctgttctgttaatctattatttgaaatcagaaggtgtgagttctctaattttgttcttctttttcaaaattcttttggtgatttgggacaatttgcaattccatatgaattttaggatcagcttgtcattttctggaaaaaaaaatccagctggaattttgatagaaattgtattgaatctgtagatccatttggggaatattaccatcttaacaatattaagtcttttgatccatgaacatgggatatgtttccacttatacgggtattatttaatttttttaacaatattttgtattgttgaaatataagttttgtagttctacaagttttgtagttcttttgttaaagttattcctaaggattttattctttctgatgctactgtaaatggatttttttaaaatctcattttgtactgttcattgctagagtacagaaatacaattgattttttatattgattttgtatcctgcaaccttactgaattcatttattagttctattttttattttttgtagggatgaggtcttgctatgatgctgatctcaaactcctggcctcaggtgatcctcctgccttggcctcccaaagtgctgggattacaggtatgagccaccatcccttggtccacgtattagttctaataggtttttgtttttgtttgtttttagatttcttaggattttctatatacaagatcatgtcacctgcaaatagagatagttttacttcttcctttccagtccagatgtcttttctttttcttgattgctatggctaggacctcccatacaatcttcaacagaagtgatgaaacatccttgtcttgttcctgatcttaggagaaaaatgcctttagtcacattaaatattttgggtgtgggttttttttttttttttgagatagcctttatcagatcgagtaagtgcccttcgttttttaacttgagacagaggctggctctgtcacccaggttggagtgctgtgacatgatcttgtctcattgcacctctgccccttgggttcaaatgattttcctgcctcagcctcccgaatagctgggattacaggtgcgcaccaccacgcctggctaatttttttatttttagtagagaaagtatttcatcatgttggccaggctggtcttaaactcctgacctcaggtgatctgcctaccttggcctcccaaagtgctggaataacaggcatgagccactgcactcggcctggagttcccttctgttcctagtttattgaatgttttttttttttttatcatgaaagggtattaaattttgtcaaatgcttttcctgcatttattgagatgatcatggtttttcatcctttgtcctattgatatgatatattacatcaatggattttcatacattaagccaactttgcattcctggaataaatcccacttggttatagtgtcttatcctttttgtatgttgctagatttgtgttgctagtactttgttgaggagttttccatgtatattccatctttatttcaataaagaaattagtctgtagttttcttgccttgcaatgtctttaatcatcatttttataaagccacatcatactatcttttttttacagttgattttctttatttttggaaattttatttcatttcatttctttggctgtgaacacatcatactgttgatggcaattttgtttgttatccgcagttccctcccgcactggccaagatgttagaagacctggagtggacctgaacctgtgttaacacaatctcatggtgcaattttgaattcgtattctctggacttcagtctcctcttctgtaattatgagattgtaagctctgcaaaattagtctttttttttctttctgttctcacaagctgttcccaatttatagagttttatagctagcatgtattcccagtccggggctctttccctcggatcaagtctgaaagggtcttcaatgtcctgctgataaataagagagaccagtgcttttaaaacagtgcgcacatgaactgtgtatgaatcaccacggactcttaaatgcagatgctcattctgtagatctagattctgcatctctcacaagctcttgggtaatattaatgccgctggtctatggacccactttgagtaacaaggaaccagaatattgtttcctaagcttcattcacataagagccaatttcatatttttttgccatattcatctttcgtctatgcaattaaaaatatatttttcttttaattaactagcaattaaatcccatctttgggtaaaatttagactaattctaggcaataatatacatcaaaccacaggtgttagatactgtatatatatatgttttttttttagatggagtctcgctctgtcatccaggccgaagtgcagtggtgtgatctcaacttactgcaacctttgcctcctgggttcaagcaattctcctgccccagcctcccaagtagatgggattacaggtgcctgccatgacacctggctaacatttttgtagttacatatttttcatgcacattaaaaatgtctattcaaatttaaaaagacagtcatctgggtaccaccagaaatgatcccacgtaccacttgaccatgcatcccctgtggtaagcgttgctttagaacttcctagggtctgagaacgtggttcttgccctttaaacaccatcacactttaattggacacttttgacttgcatctcataattttgccccccaaccctttttttttttgagacggagtctcgctgtgttaacaggctggagtgcagtggcatgatcttggctcactgcaacctctgcctcctgggttcaagcaattctcttgcctcagcctctggaatagctgggactacaggcgtgcaccaccacgccccgctaatttttgtatttttagtagagatggggtttcaccatgttggccaggatggtctcgatctcttgacctcatgatctgcccgcctcagcctcccaaagtgctgggattacaggtgtgagccatcgcacctggctgattttgccccatttttctctgctgcaatttggccagtgattcctgtctttccctctattatccaccctgattaactcagctgcacctgtcagcctttattcctgagactgagagcgggtggagcgaggcgtgctgaagaagtcattaaaatgcatgagtttgatcatattcactctttcctgtccggagcatagggggctaagtccctgggtcccacatctgagcttcatttgacaggcctggggctcatggcctagggtgaggaggcctatgggaaccagcggtggcaacctgcaggcttcatctggtggacactaccgggggctgggtctccgagatcctgtgagtttctcctggggtgtctgacatcatccactgcaggaagcagggatgaggttgttcagtgaattttccctgtattctctggaagaggtgcttataaagatggaataaggcgagtttagagaattttgattcctcttgctgctgcttatttcttccagcctctttgtcttcatctgtaaaatagggataataataactgcccacatgaggtgggaggagcagtagtgaagaattcaggttttgggcccggagcagtggctcacgcctatagtcccagcactttgggaggccaaggcaggcggatcacctgagatcatgagttcaaggccaacctggccaacatggcgaaacccctctctactaaaaatacaaaatttagctgggcatggtggctcacacctgtagtcccagctatttgggaggccgaggcaggagaattgcttgaacctgggaggtggaggttgcagtgagctgacattgaaccactgcactccagcctgggtgacagggcaagactccatctcaaaaaaaaaaaaaaaaaaatcaggttttgatgtccaacaggctggttctatcatttataatttataatgtgtaggacctggagcaaatcattttacctacaggactctcagtttcctcctctgtaaagtggagataacatctactttctagggacagtgcaggaggatgaaagagcgctgagccagtggctaacacaggctgagcactcagtggatggcagcaattgtcattatcatcattatcacatcaccacatcattacaatataaaatattgagcaaatctgggatattttggtacttaacatttgtttcctcttcctttctccctacctttctccctccttttcttccttcctcctttttccctgtcttctcaccttcttttattccccttcttctcactttcttctcatccttccttggtacatctggttgcagctgcaaggagtggcaggagcttacacaggaaaaggaggtgtggtcagatcctggggggacttgaatgtcagagggagtctgatcttcagcctaggggcaatagtgagtcactaaagcctgcggtggagcagaaacaagctgtggtgaaagtggggaagtgagcctggcagcagagattgggaaggggctgtgagggcagaagctggagccagagaggtgagctatccagggagcctaaaggtcaagtgagagagatggggaagcagaggctgcatctctgtctagagctcgcctgggagaagtagcctcattctctacgttcaccttgcccacaaaacccagccggagcacccacctctgtgtgacctcagacaagtgcttaacctctctgagcagcagtaaggccatcttagctcttggtgacaccccctggcttcctagcaaagacacttctggatcctacaggcttccatcatcttccaggctgctctctgctcagagattaatttgtttactcccttgcctggagatgaaccgagggaactaatcgtccatcagcgcaggctcccccaacctcgcaccgccccgccccaaatgtccattttctggcaaaatatgtccttgccgctgacaaggctgcttggaaaatgctaattttatcctcgaattaaaatttgttcccttaccctcgttttaataaaaatgaagcatccggaaacattgccacggtgcagaagagaaagatctgacataatttttaaaatgccttcaatcacgctgacttctgaacggtctgtcctctaaccctgaccccctccccatctcccaaccccctgaggcagcatttacatttcttaataacccctcattaatattcatgagaaggggcgggtaataacggctgagcacaccgcactaattcaatttccacccgcctcagcgtgtttacttaatcaccaagggacccgggttactcagtacaattatttattcggaattagatctggaggcatctggactggaaacagggaaccaagagcaaaatgaaaatcgaattctcttcgtcctcccctcccagccgcctcttcctgaccgtgtgccaacgctccaggcagccagcagggcttagaggacaaggctccgtgcccgccgggcagctcctgaaggaactggctcgtgaggggctgaatgtgttccagatgctctggccccggcaggaatctctcatcaacagtagccttggagttatcgcaaggcccagcagtgggccagttgcaccgtcccagccaagagcatggccagccagagttagggtgttcaggagatgctggggtattggcccaacctggacatgcagtgtggacagacttttgatcacaggccctgtggaggtgagagtttgtgacatggggtctaaataacacctgctcatcctcgaacccccgcttaactgtcacctcctccaagaagcctttcctggtccccagacaaggttagcttctcctattacacacaccttctgttacaaccaggatgggcttggtcatagcaccttgcccactgtgggtgttcacacaatggtttctaattagttgttcagggtctgtttctcccaatagtcagttccgtgggagtaggtcccatggctgtcctggtcacgtgttcctagcatctagcaatgcccagcacagagatgctcaacagtatttgttaacttcttgactgattgattctactattgactcctgattctcaagcctctgtttccttatctgcaaaatgaagctaagaacattcatcttgtaggattgccgtggggactcagtgttttccatgtaaagaggatgcagaggatgtcggtgtaaagtgttgagctcagtccctgacccacgataaacacccagttcacataagatgctattattattactgttatttctgatggtggtggagcacagacaagttaactgtgggaggcctaggtagacccagaggaggctgggcttggagggagctcttctgagtcttgagactctgagattcaaagtcttgaaatgcctttcccaagttcacacagctagtaaggtcaagcctccatcctgcttatccttttaagcattggatgaccttagcaagttgtttaacttttctgagcctcagtttcctcctccgtaaaatgaaaataataatggcagccgcctattggattgctagggaagattcagtaaggtccctcgtgcaatttagcatggaagctgatacatgaacttaatgaaaaggggtactgttacggcagatgtggtgagtccaggcagagggaatagcatgaatgtatttatctattgattcacttactaatgtatttggttatggattcagcatgcattcattagcccttaccaggtgcctgccccagtgctaggctctgacagggagcagagaggtgcagaaagcacagctccctcagattggagctcccggctgatagaaaaagtgagtcaggaaggccctcactggcacatcagcaaatgccaaggctgtgagggtacattggaaccgtggcttccagctctgaggtttaggaacaggtgactgaaggggtggcatttggggcaagaagaagaatttgggccagagtgagggggcggagcatcctacgaagaggaaccagcaaaggtatagacctggcagtggggattttctgttacagccaaagcatcctcagttgatacactttgtgtatgttacccctactacttggactacacccttctaccttgatgctcagcaaactcctactcatccttcaaagcccagcgccaaatgacttgattgtccagtattctgacatctcttggcaaagccacaattctttccttgtgttctccagcactgtgctcctacccagtcctcagccttctcatgtagtatcatctgcttacccacctatccctggttcttacccttctgcccctctgctctgtattccagggggctgggtttggccaatgggaggcgccggtggggggctacagggcagaaggaagggagaagtccaggtatttctcctctccatcttgggcagcatctccagcagtggctgtgtctcctccatgtctctagctctcctggagctccaccgtggtcccatattccaccaagtgaccctcctcctgggctggggtggtggcagcctcttgctattactcgtctttgggctgctttgccatgtccagttgtcttctcagaccttctgccaccttccattccctggattaaagttcctcttttgtaaatactcaagtgtttcctggttagacactgacccatacacttccctaccaggcgacaagcttcctgttgggaagggccctgccttgtatccccagggcttggatacagagaagctgcccaaaggttaatgaatgaatgaatgtcttttgattacatggcttgtctagccagattctactctcatttagcaaaagagaagaggcataagggaatgaattgctccctggggttaacaaatgtttgtatgaaacaacattaggccaggcgcagtggctcacgcctataatcccagcactttgggaggctgaggtgggcggatcacggggtcaggagttcgagaccagcctggccaatatagtgacaccccatctctactaaaaatacaaaaattagccaggcgtgatggcatgcacctgtagtctcaggaaggctgaggtagaagaatcgcttgaacccgggaggtagaggttgcagtgggccgagaccacgccactgcactctagcctgggtgacacagcaagactccatctcaaaaaaaaaaaaaaaaaaagaaagaaagaaaagaaacaacatcaataataataatactaaagaaatgatgtgtaaataagaaaatgctttctaaataatgctaagcctgtaagcttctttgtagactgtaaaattcagcatccacattggattttcctgtttcagcccatatcagtgtttctgctgaggtggctgcagagtgggaggccaagagataaaagagaagataatggattgggggccatgtctcagcccaagatcaaaaggcagagaggagcgcaggggacagcagatggtttaatcattacagactcatttagagaggccccttccctcccttcctgcctccaaagcacctggaccctcaagtgcccagacaagttcccagaactggggctgtgttggaagacaatgaaggcctgccagcctgtctgccagagaagttcagagggctgtgggagggggcatttctctagaagtcaaatgggaacagcaggatgggtggattgtgggattcggagaggagaatgagtgaaagggaattttagagatgcaaggaactggcgcagcctgtcttaggttgggttccctgaaaagcagagactaaaacaaagacttgagtacatgcttgggtacatattttatctgggagatgctcataggaagtagaagcgagggaaccaagagagcaagacaaggaaggagctggttgctgcagtggataattgggatttgattgtgcaaatagcctctgagtattatgcagaagtcatctcagaattgttcacccagaggatagaaggctggggcatttatcctctaactgctattcccccaagggataagcattacccgaggtaggtcattaactttccacacctctgagctgtgcctatgggtcacagaaccagggaccaggacttccaagacagccttgaggctgcaaagctgagagactaggcaggcacttgaggtgggaatctgccagcatgcatgggagctgtgtagcccagctgcagttgaggtcagaggtggggcacaaggctgtagcatggtggcactcacagcatctactgcactctactatccctgctgcacacagcctgagtcctcaagctccatggccattctttccttcctttattcactcaacaaacacttcccgagcacctactctgtgccaagaattgtgctaggtgccaggaagagtgtgtgagcaagacaaacatggcccctaaccacacgctgcttatattcaaattcagaaggcagaaataaataaacgtaggtgcaaattagtaagatgccttcagagagtgataagtgttctaaaagaaagaaacaggggtgatatggtttggctctgtgtccccacccaaatctcaccttgaattgtaataatccccacttgtcaaggatgggaccaggtggaggtaattgaatcacgggcgtggtttcccccatgctcttctcataatgagtgaatctcatgagatctgatggttttataaacgtctggcaatttccctgcttgctctcattttctccttcctgccaccatgtgaaggacatgtttgcttccccttctgccatgattgtaagtttcctgagacctccccagccatgctgaactgtgagtcaattaaacatctttcctttataaattactcagtctagaatatgtcttttacttttgtttttgtttgagaaggagtttcgctctgtcgcccaggctggagtgcaatggtgcgatctcggctcactgcaacctctgcctcctgggttcaagcaattctcctgcctcaacctcttgagtagctggcattacaggcacgtgccaccatacccaactaatttttgtatttttagtagagacggagtttcgccatgttggttagggtggtctcgaactcctgaccttgtgatcctcccgcctcggcctcccaaagtgctgggaatacaggcatgagccatcacaaccagcctcgaatatgtctttattagcagcatgacagtggactaatacaagggagatggaatagaaagaaaacatagggaaaaggaggggacctgctttaggcagggccatcagggagggtcactcttgataggtgacccctgagcacagcccaaattgttgagaaggaatatacacatcttctgccaccaatgccttgtgactcagtggttctgaaaatgtgaggtttcagggactatacaatataaaatttttttttgagaactaatatagggttgctaactattttgccaaataaaaacaaaaaacaattcaactatgaatggccatttactatctccatgatttcataaatgaaaggacatttaaaacactcccagagtaggaagaacatgacctcagaataaagacagtcttttaagtgaaataaatttagctttattaaaaaccctcttcttttcttcattttgtccccaaactcttggaaatttctctccatctcaaggtctaccttgagggctcaggacacattgttattctctttgttttctcagcttggggattttggtaatgggagataaagtgtgaaattgcatgtatatgcccatgtccatcagtttttccatttgcaaagttgggtagttgcttgaattatttctaaagtataaactagaaagtccagagatcttagcaattcattcatttaacagtcacagaaactgcatagaattcctttcttctcaccaccaccttctctgcgggggaaactcctctcctactctcaaaacccagttcaaatatcctgttcctgggcttctctctgcaatcagtcagccatcctccctgcagagagtcttggcctatattgaggacacagcccctatccattgtgataggtgattgtctctgggtgggggaaattggtcctgtgtctcccttccagaaaatcttttcatttctcagaactcctcagtataaatgtgggtaacgcagaaatgcaggaaatagagatttgtgagcagaagagaaggggaagggaagtagcatttattgagtatctgcaatgcacctgtcaggtgcttcacgtgtgtattatttcattggaagctcttacgtactttaatacagtccctcccaccataactactgctccttatcccattcctacacacacactgctctttccatctgtgacacctgtgctcctgccatttcttctgcccaggaaacctcgcctcctaagtcctcctggattcttcctgtgtgctcttgactccacgcctgggacctggcagcctgggggtttgtccgccctgtttagacgaaaatggtcattgcatccaggccacatagttagggtcagagttcagggagacagaagctcaaatgaagaggctgcctggccctttctagcctgaaaacactgagatcctttaaacaagagactccctcgatccaagactctagagttgttcgcagttttgtgttcatggctggtcctggaatgctgattctcacttccaagattctagaactctgagattctacaaacagtggagagagcctctgcttcaggacttgagctgtctctgctgcctctccaggggccacctggcctcaggaccccaggcaagcaccgtgggttgggaaccaacctggtggaaaactaaaatcagcccatcttcaggtctaccgcggcggatgaagcctcacgcagaacagatacagttgcttggcaagcagggggctgcaggtgtgtggaggtggagaggatgccccctgagagaccttcctctcccctctgagactggagctgctgtgccagcctgcaggcccttttcatgacaacagttgcttagcgcctgccagtcctcacaccaacttccctcacctgcccctctttccttttttcctttcctcactcaaggagccaattttcactcagtaaactttcaccacttcatcctgcatgccaagtgctgggttaagcatttggcatctatcacagattgggctctcataagccaagattgcgccactgcactccagcctgggcgacagagtgagaccctgtgagagagagagagagagagagagagagagagagagagagagagaatggtcagagtcctaatcccaggtacttgtgaatgtgatcttatttggaaatggggtctttaatgatgtgattaagtcgagaatctcaagttgaaatcatcctggatttaggatgagctcgcaatccaatgacgggtgttcttatcagagaaaggagagagagttgagacacagacacagagaaaggccatgtgaatatagggagcagaggctgagacaggagagatgtatctgcaagccagggaacacctaggcttgcccacagccgctggaagctgggaaagaggcatgaaactgattctccctcagggcctccagaaaaccaaccctgctgatctcttgattttagacttctggcctgtagaactgtgagagaatacacgactgttgtcttaggcccccaagtttgtggtaatttgtgactgcagccctgggaaacaagtccagaggcttagtgtatgctgttccattgcctggaacatgatgctcttctctttcccaaacagtttctcaactttgccctttggtgcttgtaagtggacatatctgcagagaagaaaggagacattttcaaagaattgctcttactgcctcctccttgtcctgtggctctcagctcaaatggcacctcctccaagaagccttccctgattttctacccttctctgtgctcccagtttcctggactgcccgtgccacagacgtgctggcactgtctgttgacatggcttgctctctacttccccactggactgggcactctgcaagggcaaagactgtgtttggcccctctttgtggctgcagctgtgccttgcacaggttcaggcacagtacgggtgttcactaatgtttgctgaatgaatcaatgaacaaatattcccttccagttctgctccacctctggactcctgccccacaggggagaaaccctttttgaaagcacctgtgacatagttcaagatcaccaatgtcgggcgagggtaggacatgcaccctggagtccagccatacctcagcacagccctcctgcccacatcgccaaggccctgtcagaggcatgacaaacagcttggctgatggcttataatgtcaaagatgatggaaacagggaggcgacggctgaaagaatgggttggggacgcttgtcataactttatttgtgggaggtgagtttctgtcggctgggtgatggatggtggcagggcaggcacaatacagaccctgccactgcctctctcccctgtctctaagccaaatgactttggggatgaaaaatgactttcttgggagaacccgggggaggggaacttcattcagggtgagggggctgtctggtcagcaccttggagtgacttttgctttttttttttttttttttgctgagagttgacttttttctgggacagtctgatcatttctttccttccttcttgcttccctctctcccttgacaataatcacagacacactgtctaccttgattctccaaactgccctaaaaagaacatacatttttacagaggaggaaaccgaagcttgaagaggagaaatgacatatccaagtgccccatgaagtaagtgaaagacctgggagttgaacctgggtccagttgctctaaagcctgacctctctccacaatcaagtgataaaaaggccacagggctgggcatggtggctcacgcctgcaatctgagcactttgggaggccaaggcgggcagatcacctgaggtcagaagttcgagaccagcctggccaacatggtgaaaccccatctctactaaaaatacaaaattagccgggcatggtggtgcacacctgtaatcctagctactcgggaggctgagacaggagaatcacttgaacccgggaggcggaggttgcagtgagccgagatcacaccattgcactccagcctgggcaaaaagagcgaaactctatctcaaaaaaaaaaaaaaaaaaaaaaaaaaaaaaaaaaaaaaaaaagaaaagccacagaagtagcagcatgtgccatgttccctggaagcacagtgaagacagcaattaatccgacaggaggaagtcagggaaggctgcctgtcagaggtgacatttcagttggtcctgaaagggggagtaaaatgttaaatgatagaaaaataaggcaacaatttaggaagagagggttttgggagtgagaagagaaatagagaggatttgcatacatttttgtttgcttacccaaaaccagacactgtcccctttctcctttctattttttttttcctgtgtgtgacagtgtgacagttttgctcttgtcacccacgctggagtgcaatggtgcaatctcagctcactgcaacctctgcctcctaggctcaagtaattctcctgcctcagcctcccaagtagccgggattacaggcgcctgccaccatacctggctaatctttgcatttttagtagagatggggtttcaccatgtggccaggctggtctggaactcttgtcctcaggcgatctgccctcctcagcctctcagaatgctgggattacaggcatgagccactgcacttggcctctcctttctaatagagccaccattttgggggaggtggtaatctatccttctacaaagagccatgggctttaccaagccattcatgaggttctaattcccttgtgagtggctggtttggaaacaggaatgagaacaattctgctgaatgaaataagaggaatgtttgctcaggggcttctggaaaagactttttgtttgtttgttttctttttttttaaacaggatctcactctgtcacccagtgctgcagaggcacaatcactgttcactgcagcctcaactcccggatgcaggtgatgctcccccctcagcctcctgagtagctgggactaaaggtgtgcacctccacacccagcaaatttattgtatttttttttgtggggggtggggtttgtcatattgcccaggctggtctcaaaatcctagtctgaagcaatctgcctacctcagcctcccgaagtgctgggattacaggcatgagcaattgtgcccagcttttttggtttgttttctgaaagagaaagcccctcctcttttgcaggacatggtcacatgcatgcacgatgcctggaagtgtggcagccgtcttgtgactacatgatggaactaatacatgggtgatgactcagtgggaagataggaaggacatcattaaacctctgaatgaatgactgctacagccaccataccacagaacttaatctttgagttgatacatttttctcactgttaaccagctggattggtggtttcatttttgcagcctaaagtattctggctgatagaagaaataaagagggtgtcaagcctcctaaaggcccccacctcttaataccatcacactggggataaggtttcaacatatgaatttcaggggacacaaacatttggaccacagcggagggcatgtgtatcggtcacattgccttggtccgaaatctgactacacctggctgtgtgacccagacaagttacttaactcctctgagccttggctccatcatctgtaaaatggaaatagagaggatgttaggattaaataagtgctgagagtagcactagcatgtggaacaaccacaaaaaattgagatttgaggccaggcgtggtggctcacacctgtaatcccagcactttgggaggccaaggcaagtggatcacaagttcaggagttcaaggccagcatggccaagatggtgaaaccccacctctactataaatacaaaaaattaggcgggtatggtggcaggcacctgtaatcccagctacttgggaggctgaggcagataattgcttgaacctgggaggcagagtttgcagtgagctgagatcaggccactgcactccagcctgggtgacagagtgagactccatctcaaaaaaataaaataataaaataattaattaattaattaattaagattcgagtgtctaaggagttagtcaaggtcacagagtcaaccagtgtggtggaagcaggctgcatctcaggcctgagctcagagctgtgtgtgtaaccgttgcatcctcctgcctctggaaggcagattcacggagccagcaccaaggccagggcccagagctcagggttggatttctggttgctgaattcatgctgtactccctggcattggctcagccaactgtggctaagagttgactttgcttccctgctctgtgtacctgtcttccaccccctctcctgaacagtatttccctggggctcccattaccaatttgcagagcaaaggcatgcacaggcagttcaggggtggcgcaagctcagcgactctggtattgtttttaattcaatattttgtccctgtgcgccagcctcctttattggatgagaacactgttattggatcctgccctgcaggagaaaatgcaggcttccccagatgatggcagctacgttgttctagagtctgatgagtcaaggcagggcgagaagacagaagagagttccagaaaatctggtggttacaagctgttctgtgacacgcacaaaaaaattaacatatgtattattgacccttcttcttcccctctcttctagggaggacaaaagcccaggaggcagctgtcgcatcatcctcttcctttccctgcacatccgctacatcccttggtcctactgatttcacctgccgtttcctctatgtccaacgttactcagtccaagtccccaagcatttcctgcctcgacagttattctaccccatcctcccctgctgctctcaaactcctccttcttttttttttttgagacagactcttgatgcccaggctggagtgcaatggcgtgatctcagctcactgcaacctccgcctcccaggttcaagtggttctcttgcctcagcctcccaagtagctgggattacagcgtgcgccaccacacccagctaatttttgtatatttagtagagataaagggtttcaccatattggccaggctggtcttcaactcttgacctcaggtgatgtgcccgccttggcctcccaaagtgctgggattacaggcttgagccactgcgccagcaaactcattcttcttcttacagactctcttatttgagttcacctaaaagcctgagataaggaattggatgtacagaatttatttgcatggccatcccaggaaacacttggaagtaggggagtgggaaaggaagacagggaggggtaggcagccaggaaaagggttatcgagcaggttacactgtggataacgggggcttgattccaccagacctctgggagcccatgaataacacctcggagttctcctgcctgcggagttggggagcagggtatttatctactaggtcctatgggggcaggggtgttcattctcaggcacctctgacctgcttcacaggcgggaagagtgtgctccagagttgttaaagaaagtctttaggtaaagagacacagtgggctgggcacagtggctcacgcctgtaatcccaacactttgggaggccaaagcaggtggatcacctgaggtcaggagttcaagaccagcctgaccaacatggtgaaaccccgtctctattaaaaatacaaaaatcagctgggagtggtggtgggtgcctgtaatcccagctccttgggaggctaaggcaggagaatcacctgaaccagggaggcagaggttgcagtgagccgagattgcgccactacactccagcctgggtgacagagtaagactctgtcttaaaataaaaaaaaaaaaaaaaaaaaaaaaaaaagacgcagtgctggcaattggaagtctgcccagtgcacacttaattgtgagggtcgggggtgtgggcgacgaggcgctggcagcatctcttctattagacacagtctttgacttaaagcccgctgatggcttccctctgctctttggagtaaagactcaagttatttgggtgtttgttttgttttgttttagaggaagtttcgctctttcacccaggctggagtgcagtggtgtgatcttggctcactgcaacttctgcctcccaggttcaagcaattctctcacctcagcgtcctgagtacaggcgcatgccaccacgcccggctaatttttgtatgtttagtagagatggggtttcgccatgttggccaggctggtctcgaactcctgacctcaggtgttccacccgtctcggcctcccaaagtgctgggattacaagcttgagccaccgtgcccagcctttttttcttttttgatatagtgtctcactctgtcatccagactggagtgcagtggctcaatgtcagctcgctgcaacctctgcctcccgggttcaagcgattctcctgcctcagcctcctgagtagctgggactataggcacccgccaccacacccagctaatttttgtatttttagtagagatggggtttcaccatgttggccaggctggtcttgaactcctggcctcaggtgatccactgcctcggcctcccaggtgcttacaggtgtgaggcactgagcctgaccagcttttctttttcttatatattgttttcatttatgccacctttttgtgctttatgtatctttgtcagcaatcttaaattctttctggaataatgtggtggtataaataaaaacatacaacataaatataaataaatataaaatgtaacaagctctataaaaacctgttcctaaaatatcaacagtgcttgtttttttgcagaaagaaataagatgattagagatgtgttggggggaaatgtgcatcctgtgggggctgatgtgtgtgattttacgaaacccaaagtgtaagcattacagatcactttaagaaataccatggagataaaaaaattatttttttcctacttcattatttatttatttatttatcttgaggcagggtctcacacccatcagtcaggctggagtgtagtggtgcgatcgcggctcactgcagcctcaacttcctgggctcaggtgatcctcccaccttagcctccccagtagctgggactactggtgcgtgccatgatgcctggttaattttttccatttttagtagagacggggttttgccatgttgcccagcctggtgtggaactgctgggctcaagcaatccacccgcctcggcctcccaaagtattgggattacaggcgtaaactaccacatctggccaaaaattattttcattatttactcttttataggtatagatttaatgtatttcttttattatttatttctctaatacttgttcatggtagaaattgaggaaatacaaataagcaaaaaggaacaaaataaaagccatctatatttcactagtcagagatcatcaccactaacttctttaggtgaaatttggatagggggtaaaatttttgtatttttttgtagagacggggttttgccatattgcccaggatggtagcgatcctcctgcctcagcctccaaaaatgctgggattacaggcatgagccttcacacccggccttttgattttctttactcaagatttggagaggggttcccagcagggcttggagcagggcttggggtctgatggattaatgctcccccactaggtaatgggggatgatgaagaagaggaagagaaggaaaaggagtacaggaggaagaagaggaggaggaggaagggaaggaagagggagaaggtaatgatgggaacagaaagaatctttgaggcttgtgtgtgtgcctttgaggcatatgagggtaaattgggaattgagaggaccagacagtatctgctgcctggtctgattcagggatgaaatctaacagtcctagggtgaaatgttgtggacagaagaggtgagaaacaggatagaagcagaactgccttggtgcccagacaactgtaactcagcactgaggatggctgcctgtaccccatgtttctacagggcacagtatgactctgctgctaggggcacccaagcagaaggccatgccccttcagggtcctgcagctactgaagtgcctgggagcagtgccctaggtaaggcagcagtggcaagggtgaggctcccctttcaagtgacatgggggctgcagatgccaacgcagcgcctgagcagagggccctggagaggagtatacataagacaggagtatacatgagcttaagcacatgcagaaagaacacggttgttcatgacagctgggctgagattattttactggtgcatgtggaagctcttgggtcagagaaagttaatgaacatcaaggtagcatcatgtaagtgctcagaatgtcaggcttggaaaaatttagatcttttaaatatatacataggcatttaattaattactttagagacaaggtctcactctgttgcccaggctggagtgcagtggcactgctagctgtaaccttgactttcaggctcaagccatcctcctacctcagcctcccgagtagctgggactacatgtgtgcaccaccacacctggctaatttttttctaaacaaaaacttgtgatttctatgttttcaatgtcaggtttatttttaataaaatgaaagaacaggaaaagatgcacaattttctgaaacttctgaggttgaggtagatgggtttttcttaagatgtgtctttcataacactagttccacaggatgctaacaggtgttagatgaaaaatggcttctgttatcaaatggacttggaaaacattgggtgaaacagttaaacagttttcttcctacaagactgcacagagcttctcatatattcatgtgcataatgagtctccatgagaagatgtgagtttaacagctgcccctcttcccaatctgaggcgcaggaacattctttgctttcattgttgctggtgttaatttcactgatagctgctgggaatgattcagggcatctaattggtgtttatcaattgctctgtttatcaataggtcacagcggctaccaagacagaaatgtcactttttggtacctaacctgcttggactttgtatatctcttcctgcacaatgaattgcctaaaaacataggaggttaaaaacaacaaaaagcatttattatctcaccgtttctgtggattagggatttagggacggcttagatgggtgattctggtttcgtatgtctcatgaggttgcagtcacctgaaggcttgactggagttgaagcctccacttccaggatggtcccagtgaatctcacctcctggtattcatgccctgtgtggttccctcccataatgaacaggcctgagttcattgagtgtaatgaacactccataggatatcatagaaatgatggactgtgaattctgaggctagatcacaaaagacactgacttctgtcctgttctctcttggatcacctgctctggaggaagtcagccaccacatgagaacactcagccagcctggtaaggagacctatgcatcaaggaattgaggtctccagccaacaaccagtacaacttacttgccatgtgaatgagccatcctggaagtgaatgacatcgtgactacaactttatgagagaccctaagccagaactatcctgctaagctgcttctaaattcctgattcaccaaaattttgtaacataatacatgttcttagttattttaagccactaaattttgggataacttgttacacagcaatagataactaatacacatacttagtgccaaggctgtgtaataaacagccgattcagctcactagctaaggaatctgcttacttcccaagccaaaagtggtcttgaccaatgtcctttgactgaccccaaatggtaatagcacaaatagttctccctatcctttcatactaaagcatctctgaaaggtctgactcatgagggtcattggtatggggcattgatgactggcacttctcagaattagggtttatgaaatttgtttgattcttatgagtcattgtgagtctggtttcatggtttttccagctcaacatcttttttttaaatttctttttcaaaattggctttctcggggttgacagcctaacattttttttttttttttttgagatagggtctccatcgcccaggctgtagtgcagtggtacaatcacagctcactgcagcctccacctctcctactcagcctctcaagtagctgagactacaggtaggcaccaccacgtctggctaattttggtattttttgtagagatggggttttgtcatgcttcccaggctgctctacagctcaacattcttggccatggaatactttctttgtgcaatggacatagttggtccttaccagcattccttttcccttctttctaagagagagccccaggaaaagatgatctctcttattcttcttgctgttgttgttcttggaattgctgctgccatcctatttccagaagaatagtaaaatgagctccaatgtatctgtcacccaccttcagcaattacaactcaccaataattctttcatctatacttccactcaaatccatacctctcccacctctgacagttttgaaacaaattctagtcatcacattatttcatacataaattttagtatgtatcttaaaaagatgaggactcttaacacaatcacaattcctttatcatacctcagactctttttccctcccacaccaaataattccttttcgttgcatatccatgactatcgagtttttacttggctcacagtctgtctaggaacataaattctccttgtgtctaattgagacctgtgcctgctgggagagataattactcgttagcagtcaataatctcctgtgcctggatcataagtgtcagtactatttgaaaggttaactgagcccaaatccctactgtgaaacacgtagtcagacagacttggtttggagtcttgccagttactaactatgactgtgggcaaggagctaaactccagatctcagttttcacaattatttaaaaatatgacagtacaggggacccatggacctggatgttgggaataagaagcagagggaacagactcttcctgagccccagaaattgcattctgctccccagaaaacaggttcccctttccattgcccactctgtaactcttccccacccattcaggtactgattggaagagtcaggatttcttcagcagtctcgtatgtttcaaatcaacccaagattgtagggtaggagctcaatattgatgataaatatattttataagtgtgtttttgagaatattttcttaaaggctcttccaataaataatttactgggcaatgaaaaatggagaaggtgactctgattacactttggagcatctaaagtgtgaagtttaaggaacctaggcagcccatggctatttaaaagctttctggaaggggtaattcttccacattttttttaaaggttacagcccagcagttggtctcttgaatggtgctcttctcctaactccctcctggatgccactctgaaatcattatcgtcacaatttcattctgcttggtgcatagcacatagctcttctgagcattcctttttttgtctttaaaattgaaatagtcacattgttaggattttgggtgagaagtaaaaaaaaaatttttttctgagacaggatcttgctctgttgcccaggctggagtgcagtggtgtgatcttggcttactgcagccccaacatcattggctcaagtgatcctcccacctcagcctcctgagtagctgggattccaggcacatgccaccatacccagctaatatttttatttttattttgtagaggcagggtcttactttgtttctcaggctggtttcaaactcctggcctcaagggatcctcctgtcttggtctcccacagtgctgggattatataggtaggaggcatcacacctggcctttgggtgagaatttgaaggtatttgagattgttatgaccaggaattaatgaatcaatcaatcagtagattagttggttcatttattaaatcaacaactatttagtgagtaacaattaagtgccaggtactgtgttaggttctgagtttactgtggtaaatgatacagcaatctttgctcttctggagcttagaatctggaagggaaagcagtccacaaatgggtaaaaagcaaacaaatataaaaacaaaaacaataagtgttctgaagataataatggtcaggaatgctgatagagaatcttgaaggggaggaactgtcttaaatcttgtggtcaggaaagattcctctgatgtgtgcaattaagctgagacctgaagggtgagcgccccaagtctcattcctgggggttcccaaagaattattaatggaccctctcatcaagataaaatgaaaatatcttaatctggcattcaagtttctccaagattagggttgccagataaaataaataatgcccatttaattctgaatttcagacagaaaacatttttagtatgttattaaatattgcatgagacaaatttataaaaaattcattatttgtctgaaattcagatttaactgggtgtcctgtatttttatttgctaaatctgttaaccctcttcgtgatcttctccagccagcctctccaccttttcttccacacatttgaagctctgtccacaaggaagggtccaattgccttgtctttgctcatgctgttccctctgcctgggtcaccattctcccactgtatcttcttggtaaactcttctttccctttaaacccctgtccagatgttacgttctcagggaaacctctagcagagcacattagccccagttcagggtgctcaccaaacctggttcttataggattttgccttataattctgtgttttagaactggtctctacaaaaacagacaagactgattgcctaaaaaggaaaggttataaggaattctctcattcttcctgccctctcccttgcccctatcccactcaactcctttttctttcttttttttttttttttttttgagagacaaggtcttgctctgtcacccaggatgcagtggcacaatcctggctcactgcaacctctgcctcctgggctcaagtgattctccagcctcagcctcctgagtagccgagactacaggcacgtgccaccacatctggctaaattttttttctatttttttgtagagacagggtctcactatgttgcccaggctggtctcgaactcctgggctcaagggatccgccttggtctcccaaagctctgggattacagacatgagccaccgtgcccagctgccaactccttacaatattaatataagacacacagcacttttctgtgccaggcactgtgccaagtgctttgcatacagcatttcatgtaaaccctccataaccttatgaggtagatttggttgaatctccactttgcaggtgagaaaatcaggcatgtagaggtgaagttcattgccactgtttccacatctgtaaaataagactcatatcaacattttctccatgaggttttcacccaaactagaatgtaggtttccagaaggcaggagctttgttttataaacttccatatcctcagagcccagaattgtgcctagcattgagtaggctctcagtaaatacttgttgaatgaatgaatgaatgaatgagtcatgttacagataaggaaagtgtaatttagggacagagaaagtaacttacccaaggacccatggctagatatggtggaacttccactagaaccagaatcagggtgtgttgggtagatgtttaacaactggctcggctgggtgcagtggctcatgcctgtaatcccagcactttgtgaggccaaggcggggggattgcttgagctcatgagtttgagaccagcctgggcagcatggtgaaactctatttctacaacaacagcaacaacaacaacaacaacaaaataagccaggcatggtggcgcacgcctgtagtcctagctatttgggaggctgaggtgggcttcagcccgggagggggaggttgcagtgagctgagatcccgccactgcactccagcctgggtgatagagcccgagcttgtctcaaaagcaaacaaagaaacaaaaaaaccctacaagtagctctctggaaaaacaacaacattaacaaccctgatttgtagcatttgctgatttacattgtacaaatactcctagcatggctgatttcaagctatcaacctggtgtcaatcagcttgcaagtttcctacaaatttaaccatgggcttttgtagacctgtctgtgcaagctggcatcaacataccatgaactagaacacaggggtctgggtccaaagggtacaccctcaccattactctctcctgtcttcccaaacaaggcacagtctatattctattttttttttttttttttgagacgtagtcttgctctgtcgccaggctggagtgcagtggtgccatcttggctcactacaatctccacctccctggttcaagcgattcccctgcctcagcctcccaagtagctgggactacaggcacgtgccaccacacctggctaattttttgtattttagtagagatgggttttcaccatgtgggccaggaagatctcaatctcctgacctcgtgatctgccctcctcggcctcccaaagtgctgggattacaggcgtgagctaccacacccggccgggcacagtccatattcttatataagtaggagggggaaagacacccaaatagactgaattcaatgcagattgcataggtgatcctttaaaaacataagcccagtcacaaaactaccttgcttaaaactttccttatgccgttagcataaaatccaatctctctctcttttttttttttttttttttgagacagagtcttgctctgtcacccaggctggagtgcagtggtggaatctcagctcactacagcctctgcctcctgggttcaagcgattctcctgcttcagcctcccaagtagaggcatgtgccaccatgcccagctaatttttgtaatttttagtagagacgaggtttcaccatggtggtcaggctggtctcaaactcctgacttcaagtgatctgcccgccttggcctcctaaagtgctgagcttacaggcgtgagccaccacgcccggccacgcctagccaaaatctaatctctttaccatggcacacaaggcccattatgaaacctctccctctaccaggcactgtactaggcttgggggatacagtggtgaacatgacacacacatgtcctgcttgcatagagcttgcaatccagtaaatgaggctgtcaagaaacaaatagtcaaccattaagcacaaaattacagaatgagatatatacgtagtggagcaggtacttggaaaaagaataatgaggagagaggttgattacctggaccagggtgagttgaagaagcccttgtaagaaagtgacatttgagacccgaaagatgagagaattggatgaggtatggtgctgatggccaggcagaaggggagaggatttgtcattctgaggaataagaataatttctgtataattggagccagtgcagatgggatggggaccaaaattataaatatgaagggcatataaatataatataatacataaatataattataaatataaaggacaggggcttatggaaggaggtttaatttcctttgaagatggagccttaagtcccaggtgcattctgatcttgtttaagatcagatgcactctgaatgattctcttccaattatgggcaactttctcctccagaaacctttttatatcacctgggtagcaaggggatcatctagtgaccgttagacttcgcatagatgagcagacacaagcctagagagggacatgtgatcaccaatagtttctcagccagtaatagttgtacagccttggaacaagtcactttttgagccagcactatctgatagaaattaatgggaaccacaaatgagagccacatgtgtaatttaaaactttctactaaccacatttaagaagtaaagagaaacaggtaaaattcattttataatatatgaatttgacccagtatatccaaaatatcatttcaacctgtaatcaatgtaagtcttagaaatctggtgtgtattttatttacacttatggcacatctcacttcggagtagccatatctcaagcgctcggtagccatatgtggctagtgagtaaagtattggatggtgcagttgggagcgtcagtttccttttctgtgaaatgaggataaatcactggaagctcgtgagagcgcacacgaaacacccggcactccgccctggacactagggacgcgcaatcaagtttggtttcttctggtccctgctctcccctcccgcccctcctctaagtctccgccccctttccccgccccctcaggctccaggcggaagcaaccctgttccaaatgcagcgcgctttacggcggcgcgtccttttaccgcggtgtggccggctcgcttgtcgctcgcacttttgccctattggctctgcggctccgctcgccgcactttacggcagtgtggctggagccgcggctgacgggcccgcggtctgggcgtgagtgcagggaagtggagtatttgctgggccgggtaccatggacgtgggcgaacttctgagctaccaggtatgaggggcagggagggccgagcgaccgcgttctcacctgggcaggggtcgcaggagccagagccctttcatctcacctcctctcgcctcactcccgggccctctaacttctcatgccacccggggtctcagcccctcgttttactttgctctccgaagccctcctgggccctttcgattcatcccttctcaagacctgagcccttcacctcctcttcctcaccctggggcctggttccctgaaactcctctgaaaccccagactatcctttttttcacaaccatgtcctctcagctctcatgtccccccagtcattgaggtgatggtggtggcggcggtgggagtgcactggtctcacttggatttgatctccagcttctccactgactggctatgtggcttttggacaagtcattccccccctctttgaaccaagtttttgtatctatatagtggagacactaataactgccttagtagggttgtttgaggactgtaccaactgatatgtatgaaagctggttttaaagtgtggaaagctgtgcttgtgtttactgcgatttgcaggagatgttgggaattctagcatggaatgagtttctaggaatcttgctcagggtcccccttgcctaggaaacttgtggggaaactgtatgggacctagagagcagaaagggcttgtccaaagtcactcagaaacaaggagctggaatttgagctcaggcgtactgacttccaccccaaagtttttcccccactttgattccataggagggtcattgcgaggagcagtagagctgcactgccgaatgtcgtagccactagccacataggctgttgattgcttgaaatgtgactagtctgaattgagaaatactgtaagtataaagacacatttgggttggagactagtatggaaaaagtgaaatttttatattgattacatgatcgtactgattatatcaattacattggttattggtcatattgattaaatgatcatattttggataatgggtgaaataaaatatacttaattaatttttaaaattttattttattgttatttagagacaggatcttgctctgtcgcccatgctggagtgcagtggcacaatcattgctcacagtagccttaaactcctaggtctaaggtatcctcccaagtagctaggactgcaggcaggcatcactatgcttggctgatttttaaattttttgtagagacagggtcttgctatgttgcccaagatggtctcaaactcctagcctcaagcagtcttcccacttggcctcccaaagtgctgggattacaggtatgagccaccacacaccacactcagccaataaaatatgtttaaaaccaattttaactgcccctcttgacattttaatgtgtttactagaaaatttaaaacaacatatatagttcagcttatatttttgttagacagccctgcagtcaagaataggtgattaagagccatgagtctggacccctaggttgctggcagtctctgttttgctactaactggctgctgtaaccttgaacaaaatacttaatttctctctgccttggtttcttcatctgtaaatgggggacagtgacggtagctgcctcacagggctgttgtgaagctgttgagaaatggaaagtccttagacaatgcttgccaaagagtaaacattcagtaaatattagcagttattttcataccactccctcagccaaagtacaagaaattgaccctggacgcttaagacatcatgggaaagaacagttcagcaatggggagctatatagccaagagatttttcttttaaagacagtttaattgatagtgaaagatgaagggaaataggcaagttattaaatcagtgattgtatgccggcttggaatttctagaatggctagcccattaaagctagaagagtttcattcatttgctcaacaaatatatattgaacacctactgtgtgcaaggcagtctatccactgggtatacaacactgaataaaagacaagattcttgcttttgtggagcatctggtgggaagttacaagataataagtaaacaatgcattcagtttgtggtaagtgctgggaagggaatatagcagagtatgctataaaattgcactgctttgtatagtagccactaggcacatgtgattattgaatacttaaaatgtgactagtttcgaatttagatctgctacatgtgcaaaatacacactggatttcaaagatttagtatgaaaataatgtacaatatctttttttttttttttttttttttttgagatggagtttcactcttgttgcccaggctggagtgcaatggtgagatctcagctgactgcaacctctgcctcttgggttcaagcgattctcctgcctcagcctcctgagtagctgggattacgggcatgcgccaccacgcctggctaatttttgtatttttagtagagatggggtttctccatgttggtcaggctggtcttgactcccaacctcaggtgatctgccagccttggcctcccaaagtgctgtgattacaggcgtgagccactgcccctggccacgtgaaaataatgtacagtaccttaacttttatgctgattacatgttgaataaatgataacacttacgatatattggattaaagaaaatatattattaaaattaatgttgctttttaaaaaacttttaaaatgtggctactagaaaatgtaaagtgggccgggtgtggtagctcatgcctgtaatcccagcactttggaaggctgaggcgggtgggtcacctgaggttgggagtttgagaccagcctgaccaacatgaagaaaccatgtctctactaaaaatataaaaaattagccgggcgtggtggtgcatgcctgtaatcccagctacttgggaggctgaggcaggagaattgcttgaacctgggaggtagaggttgcagtgagctgagatcatcccattgcactccagcctgggcaacaagagcgaaactctctctcaaagaaaaaaaaaaagaaagaaaatgtaaagttaggtgttttgtttgtggcttttgttgtatttttattggacaacactcctgtcgaaaataacccctgggagttggggacaggaccttttactttatgtaatgtggtcgaggaaggacacagaggaatgggcattaaaggactgaaggttgagagggacccagtcatgtgaagggagcagaatgatggaggcagcaagaacagcaagtatggacataggctattggtagaagctggtgcagcctcataggggaccagaaagaggatctatgtagctgaaacgggaagtgagcaggggaatggtaagtgacaaagctgaagatgtaggcatgtgacaagactatgtaggccttccttgtgggccacgataaagaccttgactttgagagatacggtagataccttcattcaacccacttgttcatggatgaaagtgaaccttagtctgataaagggactcacctgaggttgtgggccaagatggtggccagagttgaaactagaatcctggtctccttattattattttttaatgtttacacatcttaccacatttaatcttaatggcagtacttaatatgttaatataggaaccttcattttaaagatgagggaataggtatagagaataaaaaacgtgtccagattcacacaagtgaaatgtacctcaaggattccaatctaggtagctttgcttcgtgatcataaacatttgtttattgtgttattccaaaagtatttcattttgtcaatctgacccctttccccctcaccaagagcaaatatgcctagcgcctacaggtagattggggttgccacaggctaattttcctgaactgcaaaatattacttgccttccttatcctggatcttggcctttacattttctattgtatctgagggttcaatctaagagttttaaaatgcaaatatgttggttgcacaataaggaactacaatactagaactcatttaattcaggttgacaacactgaactgaaccagtaacagggctgaaacctcctaagtctgctactggagagcactttgatctcgccagcctagggcgggcatgctcatgtccagctggccagccaggagcatctccttccccatcgcaggttccccactttggttaattggccggctagaaccattcgagaggtgagaggcccacccgttaggcaccaaaaaccagctctaggcctttgctcagcgaaatatcctcaattcaaggctaagtttcagaacccaaattcagaatcatggtctaaggcttggaaagcagcaccagtcccaaaatccacctcaggaccttattcaggccctggcttccttacaccacctggcccttatctcagaatcctggtctccttatttccaactctgtacattccccatgtgttctgttcattcagttttctttttgtaagatccatgtccactcttcctgttcctaaaagatggtaaaggctggaatgtagttcataatcagttgcacccatcctcttgcagaaagtcatgagtttatggatgcaaaagttctttgaggccaagcgtggttgttcacccctgtaatcccagcactttgggaggccaaggcaggcggatctcttgagtccaggagttccagaccagcctgggcaacatggtgaaaacctgtctctacaaaaagtttaaaaatcagctgggcatggtggtgtgtgtctgtggtcccagctacttaggaggctgaggagggaggattacttgagcctgggaagcagaagttacactgagccaagatcatgccactgtgctctagcctgggtgacagagcaagaccctgtctcaaaaacaaaaaacaaacaaacaaaaaaactccttgaaaacagtaacattttatagacatgaaagatgctttactaaccagcatgatctatctaaatcctcataacaaccctatgaggaaggtactgttgttaatccctgttgtacagataaggaaactgaggtacagaaaagagcacctaccttaaggcatctagctaggtagaggcaagtccagggtacccgggtagtcttacttcatagttggagctcctaaccactgtgccatactgcctgcctgctatatgccagatgcagaaccaaagtgttttcagacaagttatcacatttaattctcaacatgccttctgaggttggcagcatgcctgtattataggaaaggaaactcaacctagggaggtcaagctgcctgccgaaagccagacaaccagtaaggagcagggccagaactgaaaccagctgaacactcagaggtagttttccattttgttttcagatttgaaaactttttaaagttgaagtatagtccacatgttgaataatacatacatcttatgagcctttggttatagttatcatttacaaagtagactcagtacgaccactgaagtttgcttctcagggacataagggaacaaaattgtctgatttgaacatccccatccctagagtttgattcagtctcctgtgggactttagattctgcatttctaaccagatcccaggtgatgctgatgctgtactttgtgatcccctggtctaaaatgatctcccttccttgaaaaattttccccagctgagacattctcttcctctcttgtgggcattggtttgcagatttttgagcttaagttgtactttttccctgccattcaagatattgagagcaaatcacttaatcttcctgggcctcagtttcctcatatgcctaatgaggggattaagtacgcgactctctctgaggccccttctagctttaaaattctgtggtactaattatttagaccggggctccagagatttcaagggataaaaacgcttcatgtggtagactgagtggggctgagaatctgggagatttgggttttaatcccacttttatcattacttatctgggtgactcaggacaagtcactttccctttctatacatcattttttttcaatcgcttgtaaaatgaggagactgagcgatatgacttctggttcttttcatttccaaaattcagagactaagatggatgccgtttctaaaattcagagactaagccaggaaaaatatcatgcagtgtcaagaaatgtttattaaaagtatttaacattttttgggtgcttactacatttcatttttggggcgacttggtgggaagattccaattttctgctgagattggttcttctacaagtaatagagataggcactaagcgcctcagtatatgccgtatatccttgacatatgttaactattcatttgagaagacaggagaattacaatatgggcaggaggtggtggaaaaagtcttcaagagggaaccagttatgttcccaatatggaaatgtacttttttgatgccttcaggcttagacatctcatcaagaagtgtgcccagcagtgccttggctgagaagtttctgctggcataggcgcatatatgaactccagggcactctcattaaatctgattccacagatgtctggaaaaagttcttacctctgaagttttccaataaagaattcacatttagtatggcttgtgacatgagatgtattctttttgaggcaaatttgaggctaagggacccttggttttggtgatattgcagacacccactcctcttgtcctctatcagtaatatcttagcatatctcttggattgcaggagcttacagaaatatctaaacttgctcctttccccctcctagttttttcttttgaaataaaattttaaatgataataaagtgatagaaatagtattaaagaaaatgcttgagaagaggaaaactattatcctaattcaatcaatatttttctgttcccacagtccttacgtattttgtgaggctagaaccattgcatatatactactttatgttctatgtttttaatttaacattgccaggaatattttctgtgtttctacatctccttcatgttatttttaatatttgcatactttttgcttgagtgatagaccattttccctaaattgttcttctacaattggatgtttaggtggttttccggtttttgttcttggagataacattgtagtgaagtgctttgttcatgtagcatttttttccttcccatctgtcattagtatttaccatgtgccatctcctgtgccaagtattgcatgcactaaaattattatgacatggaccatggacattaaagaagaattcataatgtaaggagcaagacagacatttagaaaactaactctatgaataaaagtattatgggagcacaatggaaggaacggttggatatggaaaggggatatatcgatggggatggatttggtttggtcattgaagaaaagggagatgacactggaatcctagccttgatgaatgggtagggattctgtgggtggtaaaggacactggggacagtgattcttgactggcattattaagagcaaaagcagggtagtgaaatgttcaaagcatagggtaaatgcagcaatgggtaaaaagcagggagtggtcggagacgatgggggtcatctcagctgcagatgtgtggcgtaatacatcgtacgctcatctcagctgcagatgtgtggcgtaatacatcgtacgctcatctcagctgcagatgtgtggcgtaatacatcgtacgctcatctcagctgcagatgtgtggcgtaatacattgtacgctcatctcagctgcagatgtgtggcgtaatacatcgtacgcacgtggaatgaatcattggttgttttacagtgctaacagtatactgtttgtgtgtgttccaattttattacaacctttttttaaaaaatagaatcagggcctccctgtgttgtccaggctggtcttgaactcttggacttgagctatcctcctgcctcagtctcctaaagtgctgggattacaagcgtgagccactgtggctggccccagttttattacaatcttgatagtactagttcataatttattttttccactaatctactaggtatattaaatactagttcaaggttgctttattaagcattattttcttcttgtgtgagtttatcatttgtattattatgtgcctcataaggtagtcattgtaatttcgtaattgagtttttctgttatatgggttttttggttgttgttgttgtgtgtataagaaacattactgaaaatctgaaaactggtgctcagatacatccttcattctgtgaaggcctcatcccagtagccctaagaatatgattctaatcatgaagtcattttatataggctctttttgcatgtcagtttagtacattttgaagttactttttgttggaagtgtgactctaacagataaggaggaccagaacagatacagagctattctcattgataacatttcagactgtttttctctttcatctcatgagtgatttttttccttaagttcacttcctccctctgcgttcttctcatcatctctttcttctggcccattcttctcacacttacaaaacacattctatttatatgcctccttacacacactttttactaaactgtagacttagaggcaaggaccagcacctagcagagcatctcaactgtagttaatgtctaatacatggttgtttaatgattgaatgaactgggacatgcctttgtatatgccctggttgtttccccttctggaaagctcttgttctactatcttgttagcttgttggcctacatctctgtgctttcatgtcagacttcaagaaaattgggttcacaactgatacttcagttgcttaatcattttcctcttctttattatcatatcttgccactcttgctacaaaacctatattctttgctttttaactttttattttgaattttaaacttagaaaaaattataaaaatagtagagtttccgtatattcctcatccagcttcccctaaagctaacatctcatataaccattatgtaaagatcaaaactagggaattaacattcgtgtaatactagtaactaaactgcacacttaattcacatgccatcagagatgtctggtcatttttctgttccaggtttctatccaggatcccacataatgtttgtcatatttccttagtcttccgttatctttcatgttgaagagtactggtcagctattttgtagaatgtccaaaacctacattcttgaacttgtcagtgctgtcttttgccaaagattttcttgggcctcattattctggaatcttcactagaatttgactctgtaactctcttcttcatcattttagaagaactcattcattcttttcctttcagcatctttttgcagacagctcttagttcaccgtccctgattaatgtttcgtgtgtgtactgaacattctggccagatgttcagatatcacataattctctgcttcctcccctgcctatccccatggccagctttgcatttcagtcaggggtgttgatgttcagcagacttgaaaggagccttggaactatttctcaaagatgaaacggctcaaagatgaaagacaaggttctttacttttttttttttttttgagacagagttttgctcttgttgcccagtgcaatggcatgatctcggctcactgcaacctctgcctcctgggttcaagcgactctcctgcctcagcctcctgagtcgccgggattacaggcatgtgccaccacgcctggctaattttgtatttttagtagaaacggggtttctccgtgttggtcaggttggtctcgaactcctgacctcaggtgatccacctgtctcgacctcccaaagtgctgggattacaggcatgagccaccgtgcccggccatggttcttttcttcatggttggtacaggctcatgagcacagagcctgcctctctctcagagtaaagaaggtgttaggatatgaaaatgattaactcacagtttttgctctcctggagcttgcagtctaatggggtataccccagatttgaaatccaagtatagagtgtcagtgctgtcagggctgttatggtgccatgaacaagatgtggtggcacaaagacacaagcagctctactgctgggaagttggaaaaggctttatggagggagcgctgcaccttcaggagtcttctctccatcccttcctttctgttccaaccgccaccaccttagtttagactcttaaaactttgttgacagggtgtagtgcttcacacctgtaatcccagcactttgggaggctgaggtgggaggatctcttgagctcaggagtttgagaccagcctgggcaacacagtgagacatcgtctcaaaaaaaaaaaaatttgctgggtttggaggtgcgcgcttataatcccagctactggggatgctgaagtgggaggattgcttgagaccaggagattgatgttgcaatgagcggtgatcacaccactgcactccagcctggatgacagagctagatcctgtctcaaaaaaaaaaaagggaagactgtcaaataagtagcctcctgggtggtcttacttttatcattgtggatctcatattggcatggtgagatccaacagaggccaacagagaacactgttcttcagtcatagacttcagtcctacctagttcagcttccttggagacaggtcttcttactaagttgccttgctaattttgaaggtgaatttggtgaagacagccatgtctttctgcagtctctcagtagttgtcattgtttaaattgagggattgaatttataaggtttaaccaattagagaagttttcgtatataaaaatgacttcattggagaatgtggatggttcacaatagcttgtcagcactgtgggagaaaatacttcaaagcctgttaggcatcccttaatgtttagcttagtgcatgaacatgaactctgggtcagatggcctgcattggaatctcagctctgctacttgctagctatgtgaccttgggtccattaattaacctctttaagcctcaggtcttcatctttaaaatagagattgtataatagtgtctatctctgcccaaccatctttaaaaaaatttctgctttaccatctttcttaaaaataaaggattaaatgagacaatttggatattgctaagtagtacagtgcctgacacatagtgagtgcccagtaagtgttacccattaattttcgttatttatctcattactaacaacacgcatgctacagcaacatggcaaaaaaaaatttttttttaattctacaaaattgcctcagtattcccaaggtcattggtcccttggagattaaggttcagaatcctgtataaagaaatgagaacagtttgttacccacacatgctacagtatagaaatgttcacagtaggttaaaatacaactttattatatcaagaattatgtcatcaccatagtaattattttcccgtggtctctttaatattactaagatatctcagttttcctattttctagcgccaagaatctcgtttacaaattactccttcctttgtctttttttccccttagtgtccctaaaggaagtggttgggtttggtctgagtcttgtgtagctgtagagaaattggaatcaggagaagatgtagtaggaattctgatactgcttttaccttctccaaggtcagccatttacctctttagtatttcagctgaatattggcatcccttggagatattaagggtttggttccaaaccactccagtaaagcaagtcatacaaatcttttggtttcccagtgcatattaaagttctgtttatactatactgcagcctaataagtgtgcaatagtattgtatctgaacaatgcacatactttaattaaaaatgctttgttgttaaaagctgctaaccatcatctgagccttcagcaagttatctttttgctggtggatggagggtcttgcctccttttgctggctgctgactgattagggtggtgtttgctgaaggttggggtggctgtggcaatttcttaagacaacgatgaagtctgctccatctgttggctcttcctttcatgaaagatttctctgtagcaagctgtgctgtttcatagcgttttacccacagtagaacttttttcagaattagagtcagttctcttaaactgtgctgccaatttatcatctaagttcatgtaatattctaaatcctttgttgtcatttcaacaatgtccacagcatcttcactaggagtagagtttatctctagaagccactttctttgcttatccttaggaaacattccattcaagtctgatcatgagattgcagcaattcagtcacatcttcaggctctgcttcgaattctagttatcttactgtttccaccacatctgcagttagttcttccactgaaatcttgaacccctcaaagacatccacgaggattggaatcaacttcttctaaactcctgttaatgttaatatattgtcctcctcccatgaattatgaatgttcttgatggcatctagaatgataaatcttttccagaaagttttcaatttattttgcccagatccatcagaagaatcactatccatggcagctatagacttatgaatgcatttcttaaatattaaagaataatacttgaaagttgaaattactctttgatccatgggctgcagaatggatgctgtgtgtgcaggcatataattaacattcatctccttgtacatctccatcagacctcttgggtgaccagatgcattggcaatgaacagtaatattttggaagaaatttttttttttctgagcagtaggtcttaacagtgggcttaaaatattcagtaaacaatgctgtaaacagatatgctgtcatccaggctttgttattccatttctagaacacaggcagggtagatttagcataattcccaagggccctaggatttcaaaatgctaaatgagcattggcttcaatttaaaagtcattagtccctaagaagagcatcagcctgtcctttgaagctttgaggccaggcattgacttctctctagctgtgaaaatcctagatggcctcttcttccaacagaaggctgttttgtcaacattgaaaatctgttgtttagtgtagccaccttcatcaatgatcttagctaattcttctgactaacttgctgcagcttctacatcagcacttctgggttcaccttgcgctttcatgttatggaagtggcttctttccttaagccttatgaataagcctctgctagcttcaaactttgtgtgcagcttcctcacctctcttagccttcatagaactgaagagagttagggccttgctctggattaggcttggctcaagagaatgttgtgactggtttgatcttctgtccagagcactaagactttctccatataagcagtaaggctctttagctcttttactattcatatgtttactggagtagcacttttaatatccttcaagagcttttcctgtgcattcacgcttttctgtctggtataacaggcctcgctttcggcccattgccgctttcaacatcctttcctcactaaagcttaatcatgtatagcttttgatttaaagtgagagatgtgagactctttctttcacttgaacacttagggccattgtagggttattaattacttaattgcagtattgttgtgtctcagagaatagggagacctgaggagagagagagagagagagaaagaggaaaggctggttgaggcactcagaacacacacatttattcattaagttcgctgtctcacgtgggcgtgtttgtagtgcctgaaaacaaagtagtaatattaaagatcactcatcacggattaccatagcagatatgataataatgaaaaagtttgaaacattgcagtaattgtcaaaatgtgacacagacatgaagtgaacacatgattttggaaaaatggcagcgatagactttcttttttttttttttggaggtagagtctggctctattgcccaggctggagtacagcagcaggatcatggttccctgcagccttgacctcatgggctcgagcaatcccagattagctgggactacaggtgtgtgccaccatgcccagctaatttttgtattttttgtagagatggggttttggcatgttgcccagtctggtctgaaactcttgggctcaagtgatctgcccacctcagcctcccaaagtgttgggattacaggtgtgagccaccgcgcccagctgatagactttcttgatgcggggtttctataaatcttcaatttgtaaaaagcacagtatctgcaaagggggaaaaaaatgaggtatgcttgtagttcagaactagtttcttttccatagaattccagcagtgactgatctgaaaatgttttagcctaaactttagaattccagctccattgtgggttggtaaatggaaattagcttttcttcatcctggagttcagtgaaggatctagtgagactactgcagtgcctttctatcttttaactcactttggattatcagctgcttgtaagcagattatgtgcactggctctttgtacttcctttcaacagctacccagcaatatctagagtcactgaactaagaaggagttgaaactggccaggcgcggtggctcacacctgtaatcccagcactttgggacgccgaggtgggcgaattatgaggtcaagagatcgagaccatcctggccaacatggtgaaaccctgtctctactgaaaatacaaaaattagttgggcatggtagcatgcacctgtagtgccagctactcaggaggctgagacaggagaattgcttgaacctgggaggtggagggtgcagtgagccgagatcgcgccactgcactccagcctggcaacagagcaagactccgtccaaaaaaacaaacaaaaaaaaagagggagttgaaaccaagcagagtatcatgatgcttctctctgaatatatctgactttattccaaaagcaggcatgattgattcttgaacagttttgctggcattatttttagtgcagattctagcttcatgtttggcattattcatgtgctcattctgttaatacataaaattgagggttgatgacatttctttatttgaatcccctatttccagttaagagcatctcagtttaaattttcttttgggatccttgatagagttaaacattagcagcacaccagtcctctgctggtatataatgttggaatgcgattttctttgcagctttgtataaaaagaaacaaattgtagctacagtttgtcatgttatcttttagcagacgctctcaacatcaatgcttccataataggattaatgatgggggaaacttttgagcatctcaagcttgcatagttattcacagagaagctgaaacacgtaatgggggctctggccaggagtacctctattgggcaagggaaggtagagatgccgaaggactaacagaatagtgaaactcggcaataaaggaggacacgaaaaagacattgcgattgattgagggttgtagctgaaagaaacccataatgagattccttttttaaaaaaggtggcacagattgtattgaattgtactaacttcttgtttctctggtgtctttggaaaatgtgatgcccttcagaaacagactttccaggtaactgaagcttttaagtggcaagacgatctattccagcttcttctttgtacacatgggtaaaccagagagcccagagagggaaataactttagcaccccaacaacttggtgacaaaatcggggtcaggcagtgctgtgtccttgattatgcgtcctcttttccatgtgcaaaacatgtatttttcatcattttgtatggagagctttctaaaacatgaacattcttgcctttctcagtaggacacactgtgatctcaggagcatcattatgaatacatgttagttgtgcctgaattctctcatgaccttttgaaatctggaaagcttttacttctgcactgtggaatagtagggattttgagttcttgtgcctactttgtgtagtttacattcttttccttggtgtcagctgtcactccttagtgttattgtttgtttgatatgatatctaacctctaaggccttttttgcccattcttttaatggtgttttgaaaagttgaggttgttggaagaatgaagcattcgtattcttggtcatttttggatgaactgcaaaactttttagagctctgttgctagattccgaagtctgtgagatactagaaatcattttagcctgagtagtctatattttccatgttgcttttcctctagcatctctttgccccccccactgccatcctgggaactagagaacatctgagcaattactgttgtccactaatcatgagtctttcaagtgaaactaccactcacaaataggggcttaacctggccttctgtggggtgctcctttctttcatgatgcttatctttctggaaggtagccatttacctgtctgattgccttaaccctgtatcttttagtcagccttatatccatatacacacacccacaggcccgtgaaatctaattatatcgatcacctgagaccctgtatgtttgttcttcaccagtttatgcctctgctcacttcttgtcttgtgcctgactcttggctctctgtcataccctacctctgctttcgtctcctctccaacacacacaccagtttctttaggcttgatatgtacatgtgctctgtggctcccaacccagagtctattattaagggctctgcatggttgggatgggagctgccatatacagtgtgcctcatatggtgtgccctaccctagctggacctttaagacccaacctttggccctagcccattatctggcccatctgatcctcctgtgaaaggacagtttgagcaaaaccttgcttgagaagcttacagactttccagttctgcaactctgacagtctgtgagttctcgtcttatctccttttgccatagtttcctagtcattcaccaggggttggtaaggaaataggatgttgtttaccattgtttctagggcattgtaacatatgctgctagtcaggctgtgagacaatccagattttggggcggttagcaaatttcatttggattagtgctccatattgaacctgtcattctttaatcattccatacatatttattaaatgcctactaaatgtaaggtattacactagacgttgggaataaagtgctaaacaggatagttgtagtccctgtctttatggaacttacatccagggaggcaagacagacaatgaataacaatacctaaacaagcaaacacatactagataaataaaaacaagataatttcaaataggaatatgaaggaaaaaaataggctgatgtaatatagtgttgggggagcagtggctgtttattttggaaggttctagaaggcctctttgagaggtgacatttgagctgtgaactaaatgatgagaaagatccagacatatgaagagctgtgggactggcagtaaagatcaagggaaaagccaaaacaaaaactctgaggtgggaacagacttgtcatgtatggccagagcttggtgagtgaagaggggacagttgataaggacagaggggtcagcttcggggaggagggagaatcctaacattttttaactttattcctagcaccatgggaagccattaggggttttaagctgtcgagtgacacaatttggtttacgttttaaaagatggcttcatctacagagtggagaattgtagaggagcattctggccagcttagctgtgggagggtgtggaattcacctttgtgctgcagagggcctcagctgaagccatgctgtccctgggataattgctttcccgcctaggttgttttcacaatctccacttctaaacatttaatctgtgttctggcttaatcaagaagcagcgctctccttgtgccaggcttggctcagaaaatgtgggcatcgtgccttttgttgagcgccctggcctggagagaatgaagaaagcatcccctcatggcctgaggacaatgcagctgaccctcagcacctggtaacttgtaggaagctttagaatctataaacttgatgtgcttctgcaaaacagttgcagatggtctgaagtgatgattaaatatcactgccactttgcccagatctgctatggccattctctccatgtctggttttacattacagtgggtaattaagggggcacaaccatttctagttacttccaggccatctttttcaattggcttatggggaaattacagttgctgtcagttgtgtaagtgactgcattgagcagcgattgtgaatggctactttttgtgttcaaaataatactaatacaaaacacccaaacttaaaaagaactgttcctaatgaaagggaataattgcctgcctctgctgtctctgctggatctccactgggagttctgccatcagacttgtcagagttggttggcagggactttttctcctgagttagcacatagagatatgaacgggcagagataacacaaattagcaaagatacaagcatatctgcagaggaacagatttccttccgaccagaagtgccgttggtgggcaccaccctaattttcagtgcatctcttagtgctgatgacaggacttttcagcaaattttttaaaaaatggcttaagcaccaccggacctgggcagtttttataagattttagagtttcaaagggctgctaagcttgccaatgtaaagtcactgaatattgtctccctggctgctcactggggatccttacacctcactcagcatgatgaacttggagacagaaattcgtaagcttcagccccattttttttgactgaagatttctttttccattcccacaaaacttgcaaggacacagaaggctcagtgggggaaaaagatggcatgtgcctctggctgacatgacttgtgccagtggttgcgtggggattccataatgaagactgcaaatcacttcccatcctcttggagcctgtcccataattagaagattaaacattttgtttaaattggtaattttttccccctcccctctctgagtgcttaaaaccaccattagagcagaatggagactggttaactgattctgggctccatgttctagttgtgattgtcagcaggcggttgaggaagtcttattttaattaaaaaagcaatttttagctatgcttcaccttgtgtgaggcagaggcacctctgaccgtgtgaactttctgattgctgaatgtactgagcatagcttttctcaggggcatgacaccaagcctaggcagataatatcatggggtgggtgtgcagctggccttgaggtattgcctctgcactaatggcagatttgctcttcatttgacagattgactttgtgtttatgggcagggtgtcacagggatggcgtgttcctgaatttaagtgaatgcaaagcagctcatagaggagcatggaaattttcctacttttaatgaaataaaagaatatacgttttctccttcccatgaaaccaagccaaaagaacaaaacaaagggctgaggactactcggtatcaaagcccactgagagccaggctttgtgctgttcgacttatgtgtgttatcccatctcatcctaaaggcaaccctgggaagtcaatattcttagttccattttgcagatgaggaaaggaagctcacagaggtttggtaacttgcccaaagatacccagtaagtagatggtggaatcttcttcctagaagagggctccaatggatgaagtactctaaaaaaaaaacaagaaggaagaccttcgagaataaactgccgcagaatcctgccattcctctaccttgtactttcctccaagtctactctgcctgccactctctattggaatttcttgattacatacttttcttattggactgtgagttgctcaaggacagtgaccagatcagcgcctgccattgagtaaatgctcaataaatatctcttgactaaagaaaggaaaggatgagggtgaatgaatgaagcagtgaatcaatgattaggtgattgaatttgagtcttctctaggtatctttttatattgaggcttagcacctccccagttgccttttttcttgccttttccttgatgggaacagattaaggtgtttttgtgaatgatagtagccctagtcatagataacttggagttgagtgaatcttgctttaagtaatagtagatgatcttcataaaagcctgattctattattttgtaatctgacagttgactggcatttcttttaaaggctattgctgtctctgactctaaagcaggagattgattgattcatttatttgccaaagatttgttgcaagtctactgtgggccatgattgctgttttctctttacccagccttataggcaaaaaataagaggttgtacagaacaaccaaattaggttttattttgtgttggttggatctggcctatccatttccatttgatatttttctttctttctttaaacatttattgagtgctttttttgggttaggtgcttccacaacactgctaccccacatcagtaggatggctttttccaagggtgaaactaaggctgaaatggtggttatttgtccagggtcacacactagtgacaacaaacccagagattttgactaccaaagtccatactcttttcaccgcacctcacccccccgttcacgtgactagtttagcatcaatttcttatgtgttttatgtttcttacagacctaggacaaacatgggtttctaaaacagaaagtactagagccgctaacagttcacttgagttaaaggaacctcaggaaacagatctgtagtaatcacagaaaccagttatagcaagatgatttctcaatctcatggtggtagtatgatgtcatagaaagagccttaggcatagactgacgggcagcgtttgagtcccatctccactattttctagctctttggtctttggcagttcactaagcaagccaccacactttggcttccttacttgtagaaatgaagaatggtatcacctacctagaagagttgtgtgaaggttaaaaagataatgaaaatgttaagttcctggtacagagtaggcacatagttaatggtaactgttgaatagtttggataatcgtttggtgaggaagctgtaggaggaattctttatggtttctgtaaaccccacaatgctgtgacctcggtgcctcctaagaagttatttgtgagatttatatctgactttgccttttgaggcccattctggctcacttatgcagctttatttaaaagaagtggccgaattcccttgtgtacagggtttttcaggccgtgcatctttgtgtttttttggtatgtttactggaattctcagatttctaagtaatttcagtctgcgacaagtgagtagaattgatgtcaggctgctttaacacaggtgttataaacaagattaagaggttgttgaaaagatatcagtggagctctgaggctagctctctgaagtcattgtaaattgacagctaatgggtagtttgccttgatggctctctttgagttggttgtaactgactggagattcacccacagaggaaacttgcttatgaaaattcactttacattcctttatcagaaagtaaagctatagtaatatgtagtattgtctgtgcactgtttttgggtattttttttttaaaggcaaccagttcttaagtatttttgataccctaagcctgccaagcttcaaaaaaaactttaaataggggaagatgggtcaaaataattattttattctactgtttatgtataagacacttatttttcttatttgtattacctttggtagagcttcttcctgcccagcaaggtatgcattttgcctatttggtctactaaatgtgcttgctaggaaattgagtatcttaaaatgttcttgacgtgagcaagtattaattaaaaatcactttgaaatcaactttataggttccttgagagaatgttgtgatggtgtggatagagcttgcagggagaatttgtaggtggccaagacgcatttgcccaggctgccagaggatttcttttgatcatccacatggccaggaggtcagagttctctgttttttttccaggtggggaagtatttctgacactgaattgtcttatctaagaataactcattcaccatccttgtctttattggaaatggaggtattttgctagctttagtggtttgtaaagcttccagaaatattttactatttcctttgagttgaggaaataaagtgcatcttacacaaaagcagacatgaaaccatatcttttcattgtctttgatggacccatcaacaggcatgttttgaggccataacaccagacacttcattcaagctgagagggataggtaaatcagcagtcaagtgctggaaagtatgttatataatcttgctacattttcagactctaaagtattgcccataatgttgaaaaatattcttctttaacaagatactcaagggaaagttccacgtgcattctatcttccttgaaataaatgtggcagctattgaataacagacttatatggatacattttaagcttttgaagaaacaatggcaatgtctaaggtcctaagccttctgagaccaaaatcatataagaagtcttaaggaatgaatgagcaggtgtttgtaagtgaataaaatggttagtttctcacacatgatccggttctcactcattcagtcctggatcattcattccccccttcccatttttccaaaacatcttttctctttttttcctgtctctattcctggtagtatacactcttttcccccagccactcctattggaaaagggaatgcagttttacgtttttagtcttggcagtgacctgagagataacttgtagaaaaaataattaaatatttctttgcccactttggtcttaataaaatcatgcattgctagaggcagtattccactggctggagacttctctgttaacaggtatgtcttgtaacgtgcagaaccattgtgtgagttcgctggttgcagaatgcatactccactctcctctcttagaaacttataaagtatcagcatttgtgtcatcctaaatagcaaagtaaatttattgtatctgagccttggtttaaacctataaataattttaaatagctttcccatattaatttgttatttaaaggttcagagtggactggtgtcaatggcaggtgacccagtgctcagtgtgggtttctccaagtgatatgaggcaggaatttcttttttcttttctttttttttttattgatcattcttgggtgtttctcgcagagggggatttggcagggtcataggacaatagtggagggaaggtcagcagataaacaagtggacaaaggtctctggttttcctaggcagaggaccctgcggccttccgtagtgtttgtgtccctgggtacttgagattagggagtggtgatgactcttaaggagcatgctgccttcaagcatctgtttaacaaagcacatcttgcaccgcccttaatccatttaaccctgggtggacacagcacatgtttcagggagcacagggttgggggtaaggtcacagatcaacaggatcccaaggcagaagaatttttcttagtacagaacaaaatgaaaagtctcccatgtctacttctttctacacagacacagcaaccatccgatttctcaatcttttccccacctttcccccctttctattccacaaaaccgccattgtcatcatggcccgctctcaatgagctgttgggtacacctcccagatggggtggtggctgggcagaggggctcctgacttcccagtaggggcggccgggcagaggcgcccctcacctccgggacggggcggctggccgggcggggggctgacccccccacctccctcccggacggggtggctggccgggcggggggctgacccccccacctccctcccggacggggcggctggccgggcaggggggctcctcacttcccagtaggggcggccgggcagaggcacccctcacctccgggacggggcggctggccgggcggggggctgacccccccacctccctcccggacggggtggctggccgggcggggggctgacccccccacctccctcccagacggggcggctggccgggcagaggggctcctcacttcccagtaggggcggccgggcagaggcgcccctcacctccccgacagggcggatggccgggcggggggctgaccccccccacctccctcccggacggggcggctggccaggcggggggctgaccaccccacctcatgagggaggaatttcttactgaaatctccatttagacagatgacactagactcttctggatagcaaaattgcagataggcaaggaacaactgcagaaggaactcacctgactaaaagcatgggcagaaaagcagcacagggattttagtgttggctgaaagatgatggcagcagggagagctgatgcaaagtatgccttgaagatgataatttctgaggtcttgactgaggaaaggagtcttgaggttgtgtaatactgcttctactaagatgagagttagattccaggcccagttctatggcttcgggctcaagtattgtcactaatttgagtctcagtttactcatctgtaaattacagggttagactagtattctttgtctgaatctgagttttactatacttagcctctgaatatccttgatgccaccattggaaaatttaccagattatatatagatatggcccagtgtggtataaagtaagtagacaggtagattcagaagagatgaattctgcttggagaatttaccctaatggcccaaggaacttggatgaattctgcttggctgcagtcaccctaatggcccaaggaacttggagaatttgcatacatttgctaatagtaaattatgattcctggtgatttcattggtttaacttgtcctcttcccttgaattatgccaccttccttgatctccagtctgatacagatgccccatccatggtccctttgttctctatgcccactcagccacagcgctaaccggaaggctcaataatcctccattgacttgtcagtgttgtggttctcacaagattgaaagtgccttgaaggaaagaacatgccttttttgtttctttgtttcttaaaccttgtactcttggcatggagctaggtagctgcttagtaagggtgccctgtaaagctcaatgaggacagttcctttctcatctccccttcatgttcacaagggcccatatacgtgacactcattggctatcaagtgggatttatcttactttttaaatgtaataaccttagaaaaatgttagaagatattttattttatttgaaatgagatataatctgtaggcagaaagattttgttttgttttcatcctgcatttgttcatggctgacatttatacaacttgtttttctttttttatttttcttttcttttctttttttttttttgagacagggtcttgctctgttgcccaggctggagtgcagtgatgtgatctcggctcactgctgccttgatctcctgggctctagcagtcctcccatctcagccttctgagtagctgggactacaggcatgtgcgtgtatcactgcgcctggctaatttttttaaaatttatttatttatttatttttgagacagagtcttgctctgttgcccaggctggagtgcagtggcgcaatctcggctcactacaagctccatctcccaggttcacgccattcttctgcctcagcctccctagtagctgggaccacaggcgcctgccaccatgcccggctaatttttttgtatttttagtagagagggggtttcaccatgttagccaggatagtctcgatctcctgacctcgtgatccgcccatctcaccctcccaaagtgctgggattacaggcgtgagccactgtgcgtggcctgaatttattttttgtagacacagggtctcaccgtttcccaggctggtcttgaactcctaggctattgcaatcctcttgctttggcctcccagattgctaagattactggtgtgagccacattgcatggcctatacaacttaaaaaccttttcgacaggatgaattaaataaattattttttaaactaaaaaaaaggtggtggtaaattattgttttgaaaaacagaaaaatagttttcatttaagctggattaaggcccagacattgactacgagaatcttagaggtctaaatagtccagccaggagggtctgttgacagcagcatgacatataatttggactctgttgggacactttcagtgaatgtgtctttttctttttcactttagtgagtatatatatgctaatatatatagagccaaaaatctgtctttcattgatttaagtgccagctatgaacaaggcactcttaggtgctgagatatttgttagaagcaagggtcaaatcctaggatccctactcttgaagacctagctcatgatttagtagaggaaatagagacttattcacacatacattgtgtgctgggagagatctgatacagtgccgaggaagctcacaagttttactggagtatgtggaggactctcaagggaggtgacatttgagtgggggcttaagactgagtagcacttctctagctgcagtgaagggggatggaaggtgatctgccattttttgtagcactgtttgcacgtactctattctaaggcatccgttaataactgatggtgattcactcctgggtccctgcctgaatcttcttggattccattattgatttttcctatagcaaggcttccagaccctctgctatcccgctcatatattcccctgttggtagtgtctcttttaatgcacagtagctaactcacgactgtggagctagggtgaattgggttttatacttctaaaaagtgcacccttaatatgcattagctttaaaaataattaaagctggttatcctgttgactcattgaataactctgtgagagatcttgttgactttaaggtaccctgtgagtgttataaacccttaatcaacagtaacaatatcaaagcagcacaaccagttgggcatgacttggtctgcctgatccctgctagcttctggtggtacccccctaccttttttctcttcagtgtgtgcataatcacaccattttgccaaatttacttcagatcttactttaagaaataaaacattgtaaatacagataaagtctcctttgcactcttccctaatctcatttcatcacatactcctctctaatccagtttctctcttaacctcctttagaagcaatcagtatcctgaatttggtgattattattctcatgtacttttttcttactgttactatttatgcatgcatccatggatcatttaactttgtttcttattgtccagtgatcattctttaaataactacttgtgtatatgtgtgagcatttctctagtgtctatgtccctaggagtagaactactgggatagtcgtagaatatatgcatcagtggtatcaggcctcaccagtttgctctgtattcatttattctcctctgtcagcaagtatcaacagttcttgtttccccatatcctcaccaacacttggtattaccagattttttattttttcatttttgtcaatccaatgataactaatggtttttatgtacatttccctgatttctaatgaggttgggctactttttatatgcttatgggctactcattattttttcttctacaatcatcttatgttctttgtcaaaagctggctttaagttatttaaagtctggtcaggcatggttgttcatgcctgtaatcccagcacttttggaggccaaggcaggcggatcatttgaggtcaggagtttgagaccagcctggccaacatggcaaaaccccatctctactgaaaatacaaaaattagccaggtgtggtagtgcacgcctgtagtcccagccacttgggaggctgaggcaggggaattgcttgaacctgggaggtggaggtttcagtgagccaagatcacaccactgcactccatccaggaagacagagtgaggctccgtctaaaataaataaataaataaataaataaataaataaataaataaataaataaagtctgttgtatatacagggctttgcagtttgcagtcattaagagaaattgaattccgtgctttcttttcaaagtcctgtatttttatctcattttaatcttcctatcccttagcttactaaagtaaagttagtcctgtgagatagcgaagcaagggctgagcatttttttaataaatgcagcattgataagtctaatgacttatgcaaggtcatgtggctcttaagtgatttaccactagaacccagatttttctgatttttggtttgctgctgtttgcattgtaccaccttaacttcttttagatcagtgctgttttgttgttaaattgatgtctaattgtccctccagcacctaatagagtgatgttcaggttcttttagctcagtaaatacttccttaatgaatgaatggatgcggatggttctggtgtagctgacaaaacagattcataagtgtgctaaattggagatagtttgccttccagtgactttacaagtaatctgcctatgttagttttgataaagaaaccgaatcaacattcagctttctgatgtagctgtagaatcaatcagagcagatgtcaaagtaaaccatggacattaaagtatagtttgtacttctaaaaaagaaatctatacaccctttggtggtgagatgaatatatattcaggctttaacaaggaataataattttttggtaggaaaaatggattaagtctttatgactagtgatttaaatcgtacatcacatccatcttagctgtcagccaatcagattacagatcataagtgagactgtttgtaattttgatttttgatacattgatattttccccttcattgtgaacattgataaagaccatattctccagtaattactgtggtcttgttgcctgtaatttgtttttaattgggaataaatggtgcttctcttttacattttgcaaagactctgctttgggattttgaggagcgcttgatatcttttttttcctccagaaaaaaaggtagtaggttgacataattaattgatctttttttgaagccagtcttgcaaatttgcagaggtgtaatatgtatttatatttgaatatctggcattttcactcagacatttcctaaaaatatgatgatgataacacctttcattggtatagcaatttatagtttacctagggcacctttgtaaggtgtattgtttaatcatcacaacaaccctttgaggtgggtggaattttctgtctctgattactttgatctctaattatgaactttggctgatgatagttgcagcattagagtgtgagctgtttcatttgtggtgccttaagcaaatttgcaagggagccctgatgttaactttggcaggtttcatgcctgcaaatattgattgagccagaagtcctagttgtaaaatgtcaccagtgaatgtgcagccagtaaagtcaagggaaaactcattactgcaactcatctgtaacttctgggtcaggccactcactaccatctggtaaaaatgaatgttgaaaactcccttttattctgacaaaaggtaataagaagaggttaacagcagatgatttctgagcatttcaatttggttagaccaatgcatccacaagcgggtttgcgacgttccacatgtctaattattccaagaggtattagaatgctttaaaattatgaaattccaaaataatggtaggaaggaatgtaattatgtgtatacccccctcttctcctctgttgccccctgtctgaccttcttattgaaagtgtttattctcgaaaaggcattgggaaggaagaaataagaaggattgctgtcttgaaaaatgtaattttttttttaaatgtgagcgagactagaaatgttttacatttccttaaggggggaagtattagaagtattaggaaccatggaaggagagtgtaagtggaaaggtttctcctcaattgaatgagcttcctaactgagtgattcaaaggtggagggggcacagtttagggaggaggtgagtgtctggtcactggaggtgttaggaaagccctggcatatgcctggggagagatatgttaaaaaggattcaaacttaagatagatgactgggtgagatcaaggatgcctgatgcctgaactgtctctagagcctcagaattattgcaagaagttgtggatccagatgtacacaagcattttccgagaaatgagtacataatctctgtctcccctctctttatttgtcaatgtggacattaaaacacaaattcaatgaaaagtattaccaaataatagatagtaatttatttgtttgttgtcattgtgtcttaatcattgggtaccaaaaaatggaagtccgagggcgggtggtcctgtcaatctttttttttttttttttttttgagacagggtctctctgtgtcacccagactggaatacagtggcatgaccttggcttactgcagcctcctgggctcaagtgatcctctcacctcagcctcctgagtagttgggactacaggtgcgtgccattatgctcggctaattttttaaattttttatagagacaggtcctcactatgttgctcaggctggtctcgaactcctgggctcaagtgagcctcctgcctctgcctcccaaattgttgagattacaggcgtgtgccactgcacccggttggtcttgtcaaatattttgacattaaaaagggacccacatttaaaaacctaactattaatggtcagagttctttccaaccttgagcctctttgattttttttttttgaggcggagtttcactcttgttttcccaggcaggagtgcaatggcgcaatctcagctcacggcaacctctgcctccccagttctagcaactctcctgcctcaggctccccagtagctgggattacaggcacccaccaccacacctggctaattttttatttttactagagatggggtttcatcgggttagtcaagatggtctcgaactcctaaactcaggtgatctgcctgcctgccttgcctcccaaagtgctggcattacaggcatgagccactgcgcccagccgcctctttgatttcttaatcaagtatgtcaggagaaatagggagctcagtgtgttgttttctatgggccaaactgctctgtactttaggaacacaagcctttaggctgggcgcagtggctcatgcctgtaatttcagcactttgggagaccgaggcaggctgatcatttgaggtcagatgttcgagaccagccttgtcaacatggtgtaaccccatccctaccagaaataaaaaaatgagctgggtgtgctggcacgtgcctgtagtcccagctacttaggaggttgagacaggagaatcgcttgaaccctggaggaggagattgcagtgagccgagatcgcaccactgcattccagcctgggtgacagagtgaggctccgtctcaaaaaaagaaaagaaaagaaacataggcctttatgtacatgcatacatatatgcataaatgtctgtgtgaaagaggttattgttcccagcttatagactgagaaaactgaagcgtagagggagtaacttactttccaggactgctgagtagaggtgctaggatttgaatttaggaaaaattgacttcaaaactcattctccatacaggatatcaccattgcaaacaggttaggaatcattaactctagcaataatgaattgaaagccttttcctgttgatggtcgtttctagttatagcctgtctaaaatagccactagtctgtgttcttatattttaatagtagctttgtttacttatttactagtgacttcttcagggtcctcttattttctttccagccagttttaagttaacatggagaaaaaggaaaagcactatattgggatttagaagccttgtggtcttgctcaccataggcaagttgcttaaactcactggcctcagatttccctattctattaatataaagagagagagagactagattatctctttctcctagctcaaattactaagtctttcctgttgtttgatatctaggaaacagtacttcatgccccatttggaagatcattttctgaagttagccaagctcctaagttctagatgaagaattcttggtttattacaatgtttagaaggtttcctttgactttttccattttctcattagaattggacatcttttttcataaaagtaccttttacgaattatcccctttcttagccagggaacttggaatgttgagctatatttagacacacacacatgcacacatttacacttttatattctgatacaaatgcgctcttcacattaatacttgcattatgtgttttcataatttatcataatgataccattattgctcattatagaagttctcttttttccccactgcccccaagcctaattgaggtcgagatagcccataaatgtgataatatagattgcgtgctcagaggaaatggggttgctttcatagtggagttttaatttaggattcgttctggtgatgtagcctcttcctatggtacattactttgagctcaatataactgcatgttcccacagcccctcattatagctacagcttctcactgctttttaattaaaaaaaaagagggaaaaatgaaacccaaagcttaggttggatattgtctgggtacgcagggagtatcctaggcagattgcttatttaatttttttaactccttcaaagctttcatgaagatgtcttgatttctgttttcaggggcatggatggagacacgcacacacacaggcaataggcctcaagattattggcgagtaaaggcatctatctattatcgtgaagcctactctgagctttgagtgagtgggaatcctttatcctagaaaggctaccagctgtgtggttggatggtgggaaatgcttagcttttataccactcaccacctattgggagtaaggcagggaattgtagaagattgtaaaaacccttaaaggctgatgttcagaagttaagagttaatcattttttctctagtcctgtgggcagcagaggcagagaaatgactttattaagaacagttgcttttgtcattccttcatcttgagggattccaaatacctttcggataccaaaacaaattaatctccaaaggtgactggtaagaatggcttaagcctctggggattggttgtgtaagacacagggagagctcagcctgagctgttgacctctgtgacaggctgtgagtgttacattctttttgtggatcaagagccctttggcttccctttggtgaaatcagtttgacagctctgagcttcttccctgcttacaattcttgttttgttttgtataagcagtcactctctcagtggtgactattgggtaaatataaattaggaagtttatttcttggtcagggtgttgagttagcttcataatttttagtgtgactctttcacgaacagacaggacttcaactttttgcgtccatatttcactcaatgttgctggaaaggcaaatccattttagcttgtatcagggagctggaacccttcagatggaaatcccctaggcctgtgctgttcagtactatagccactggcctcatatggctgttgagcacatgaaattgggccagtctgtattgagaaacaccataagtgtaaaatacataccagattccaaggacctagtgtgaaaaaaagaatgtaaaataacaaatgaataattttttaatatagattacatgttgaaatgatactattttgggtatgttagattaaataaacatattattacctgtttctttttaaatgtggctactaaaaaatttaaattacatctgtggcctgtactatatttcaattgaacactgttctagattgttaagctctgataacaaggcagtgtttgtcttgttcacacttatgtgcccagtactcatcacagtacctcatatggttggcactttgttgaagaaatgaatcccaactcttattattcagagtggtcaaatctcaggaatgattcaaaacttccctatttgcagtgttagtgtttgaaaaagagatgtttgagggttaagaagagaaatgaagagaagttcttacgatttttgcctttagaagagaatgtggaaataaaacatatcagggcttttgcatggcttactctctgttggagagggaggtgggagctgctgtgttgctgaaggagctgtagcagagcattgtaatgggttcggctctgccatagagtcatcatgaggagctaaagataaagctgaatactgtgtgtgagggaggaggttggagaaacagttggtgaacttaaaggtaaccctcttagggatggtatacttacactattgataaaagttaacagagttattcttgtctcaatccacactggccctatttatccctgtgtccctatttatacacgaccctgttggaagcctgggactggcagctgattacttgaagacccttcaaaccttataactctttagtaagttatttgttgaattaatgatttaaaaagtattgttttaacttaaccagggtcttatatgacatatttataggtggatgtttttgcctgaaatttcctcagatgccctgtctcagttagggtcctggaatcttggtagattagcagttttccagagatcagattcaactttgagaagggaccaggttgtctttgcatgagtttattaaaagatcttaggtatcctgtctccctgtttatgaaatagagctgttgactacttctcattgccagagatgtggtgaagattgaagttctgcagaaggaaagtgctattttaatgggaatttaataaatgaaactcctcccctgacttctgaaatgtttgttttaaagaagaggattggaagatgtgttcaaaagagacatagctagtgtttttttttttctattttgcatttcttaactgtggcaatatttagctttctccttttaattgtggcccactgccttttctttctcccctcggagataaacaatctagaaatctcctttccgtggagaactatggagctcatgccttaacttggctgctgcagcaggctcacgctaatcagaatcgcagcagggcttattttatgagcttgaaagaattagtgttcccagagggctgaagttccttacctgctgaggagctacagatttccagttggaagcctgccctcctttaggatgaatctaccttcccttcctcttcttacatgaaaaccaccacctccttttttattgtagcctgtctgtggttactggcatgttgctttcctttttatttttcttttttagggtagagcagtaatgatgatagtacatttttgtaatttttgtccttatggaaaataaagtgtgttcatacgaaattatcatctagctcagggagactaggaagagagtgaaaaatagcaggtggtaccctacaaactaaattgtcgagtgtgagttttctaaacaatgtcatatgctcagacttactaaagcacctggtatgtggagcaagcaggaaacatgaataaagaggggaatgactttctaccactggcagagtactgttcaatacaagtcaaaaggggagatgtgtaacatgtataatagaaaattttctcttattaccaaacaacttagcaggctggcagtgaaagtggcattttcttttgtttggtagtaacataccacattgcaccaagcatatcgctggtgggtgtgattactatatcagataaagaaatctcattgaagaatctaacacaaatgttttgttggagaagacagaatcatgtggattacctcacagtgatgattttatgtatttgtttagtaccattatggtttagagttctttcacttgaagttcacagagaaaagaattataatgtccatttacagatgaggaaactaaggtttagagaggtaggtgatgggcccaaagttgaaccaggagtaagttgagctgaatggagacactgggctgtttggtgtctgggcagtgctgtgtctcttcagctctgaagcccctttcactactgctctgttttattctaatttaatggaaaacaacagtaagaccttcttcatggattgcattgtaaaaggcaaaatgagctggctgcagtggcacacacctgtagtctcagctattcagagggctgaggcaggaggattgctggagcccagaagttcaggtccagcctaggcaacatagtgaaacctcatctctaaaaagtaaacaacaacaaaaggcaacatgaggtcctaacagagtatggtagaaaggtccttggactaggagtctggaagtgccagttctattttcagtggtgcacgagtggttttgtgatcttatgtaatacttggcttctgggcctttattattattattatatttgatttaaaaaacttttatttttaattagcaaataattgtatatatttatagggtacaaggtgatattttgatatatgtttacagtctggaatgattacatcaggctaattaacaaatctatcacctttaatactttttctgtagtgaaaatatttaaaatcgttttatcaatttttaaatgtacagttcattattatttattatattcagcattcagtgcaatagatcactaaagcttatcttcctgtttaactgaaacttttttttttttttgagacggagtttcactcttgttgcccaggctggagtgcaatggcacgatctcggctcaccgcaacctctgcctcccgggttcaagcgattctcctgcctcagcctcccaagtagctgggattacaggcatgcaccaccacgcctggctaattttgtatttttagcagagatggggtttctccatgttgatcaggctggtcttgaactcctgacctcaggtgatctgcccgcctcagcctcccaaagtgctgggattacaggtgtgagccaccgcacccggccttactgaaacttatactctttagtcaacatttccctccgtctcccttcctccccagcctctggtgacgatcattctactctctacttctatgagttcagcttttttagattccacatacaagtgagattacgaggtatttgtctttctgtgcctggcttatttcactttgcttaatgtcttccaggtttatccaggttgtctcaaatgacagaatttccccactttttagggctgagtagaattctattgtgtatgtatacattttttttatccattcatctagtgacggacacataggttgcttccatatcttagctattgtgaataatgctacaatgaacagggcagatatcttctcagcatactgaattcaattctgttggttacatacccaaaagtgggattgctggatcatatgataattctatttttaattttttgaggaacctccatctgttttccatcatggctgtattaatttgtgtttccatcaacagtgcacagggttctcttttctctacaccctcaacaacactttatcttctgtctttttcatgatagccattctgataggtgtgacatgataactcattgtgatttttctttgcatttccctgatgattagtgatggtaagcatttttttcatatatcttctggccatttgtacatcttcttttgagaagtgtctatttaggtcctttgcccaggctctgggccttactcaactcttctgtaaaatagaattgggagtacagtagacattcagaagttacatatgtaatattttatgtttgtactatttgtgagtaactgtaaaaaaggctttgtaatcttacgtagatgtgaattaaaaccaggtgctaagacgctggcattgggagttatatcttgactagtatgtgagcctaacccagtgtccccatcttaagatagctttgttgctatttccgtatacataggaacttttgtgaaatggcaaaactgcgtataaaaaaattcccactgactttcatggtatatttatagaatcattaaggatctgaaaaatgaccacatagagctttaccccatgtggtgggagaagttgtatgctggatgcttttgagtcagagaattcttgaaagcttttaggatatttgctgtctatgccttgcaaagtctttttttgtattttttgtagagtcagggttttaccatgttgcctcaggctggtctcaaactcctgggctcaagagatctgcctgccttggcctcccaaagtgctgggattataggcatgagccaccacgcctggcttctatgttgtatccagctctaaaatcttatgtttcttttctctcagcccaataggggcacaaaacgtccccgggatgatgaagaggaggagcagaagatgcgtcggaaacaaactggtactcgagaacgcggccgctatcgggaagaagaaatgactgtggtggaggaagcggatgatgacaaaaaaaggctgctgcagattattgacagagatggggaagaggaagaggaagaggtaacgtggcagcgctgggtgggagctgagatggctggccctgtaaaacgtaattttgggccaaatactaagcttgtctgagcttcccatcttcatctgtaaaatggggttaagaattcatatttcatcgcgttaatgtgaaggttaagtgggctagtgcagttgggaaagcatcttatgagatgtaaagaatgtgacagagttttaaaattgttccatattatgtactgtaggggagggtcagggcaggcttcctggatcttactgaggacacatagaaggcacttgcattattatctttgaaagaggggtcaaatttcaccaagtggaaggaagggctttttgggcagagaaaatggtattagcaaagcaacaaaagtggagaagtttaatgggttccacagtattaggtatttaggtgtgactgcaaaagtacagcttagggaaggagattcctcgggcctttccctttgctgttcctcaagatgcgttggggcctttccactcattcctgcctctggacctttggacttctgtgtcctctgttggaatgctcgtctcccttaatgctttgtatgactggtttcttcacattcaggtctcagttcagatgtttcctcctccaagaagtctttcctatgtagccctgcaagccattctctcatttcctcattactgtattttgtatattgtctgcatagcacgtatcatgatttgaaattctagttgtttattttgctcattgctgtcctcctctcagcctcccatgaaaacagagactggctctgttctgttcacagctctatctttggcacccagagcaatacctagctcttggtaggcccttaataaatatttattgaatgaataaatgaatgaagctgggaagagtagaggtaaaatatcagtgattaaaaacaaaatgaccttacctctgtgtctttttaaatctttaagtgttaacttgtgtgttatttcactctggcattttgttcaatatgaattatggaaataagagtcttaagagccagctgttttttggttctctcaaagacacgatgctaagtttggattacaaaatgaggttggctgtgaatctgagaagaagaaaaaatggattcatattccaaaaaggtctttactgtgttgtgacaatagctctgtctttattaggatttgtactagtgctaatttgggggtctcccgctaaaagatgatggcactttagaaatacgtggtgggagacagtcctgaattttttaatttcctctctgagggcagcagccttgccagggcttagacaaacagtgtgtgtagcacatcctccctcccttccctcctcaccagcttctgctcaatctgttagccctgcagcagcagttaattggcaggtataattcccatgtagggcaaggctggtactggaggattaggatagtagctgtcatgggtaagtggtttctagcctgggagacagaaatgtaatgtgggaccaacccgtctgttaagggacagggaaaaagagatcgctttgtaaaaatgacacatggaaggctacaagtccaggagttattttctcactgccactgaagtcccatttgatgaaaaacaagtgatgtttgcccctgtaaagtcacgtgaacttgtaaaatattattgtcctttttgtgctacatcatcagcattcatctttctgaaatctccctctggtttctgacgttgagctattggagatactgctgtggctgatgactaagactgataattcagttttcccccagtgttggagagaaattaaaggagggaaggccaaaccccggagaggctaggacttcggaaatcccatgagagctgtgttaacactaatgtggtttttctccagagtggggcaagatgttagctaagaaaagaaaaagtagcagatattgagcttacttgaaagtgatttaaccctttcctagaaatgttttgattattttagttaaattctagtggtatgttgggtacattgtgcctgttgctgataataaccataacagcttgcattcatgtagtttacaaagtagttttatgtacatcctttctttaggtcatctctatgaccttgagagataacaggtaacaatttcattcatccccttccttcccctcccctcccctcctcccttcctccattcctcagatcttcactgagtacctgctgtgtgccagacactggagagtctacttatgccagagaacaagtagacatgggctagcaatgggagtctttgcactggtttggggttggagagattatctgggcagatcctgccagatccttacgtagatcatgtgagggatttgggattttattctaagtgtgtagtggatgagttcaggaaagacttaggagatagaattagctggacttgatgaagctttgagaaatatattcagcaaagtaacattgtcccatggctagtaagtagtgaagctaggctctgagtcttgactgagccaggactctgacttgtttttactgtgtcagggaacctgtctttaagctgtagaccctggggaggaggtaggggttcaatagagaaccttgggatctaggagtcattggtataatctaataaatgtgtcatgctgaaaatgaatttatgggtagctcccacttaaaaccccatatgtggaaatagaaatttaataatagaataatagctaacatttttgagtacttataaaattatgggatgattcagtgctttccaaaaggatctatttcaggttctcttaatagcagtttctttattgcttttaggtgtgagttatggtcaatgactacaaagctgtgaagctttgagttgggatagtatgaagagaagcagggtgcattgcagcacattaatttaaactggaaggaaactgaagataaaacgtgtgaaatttcagtgtagattttttggagaaaaaatgatttagttttcaaatattcattttatttgctttcataggtattattccaatgtatgaagccagaaaattctgtacagtctactagcttttttttgcattctctaggcaaggttactaaattcttgatgctacttcagggttcaaagtacctgtctgaattccttctcagcatctagtaagtaccaggcaaagtaatatataagaaatgctaagcagtgactatagctaattaacaaccgttcttagtttacgcactgtggaaaaacaggcagtaggttggatttggctcatgggctgcagtttgccaacttctgctgtaggaaaagattaagggtcactgtcactgactcagagtttgaccttaaacaattcttttaaacctgtcagtcttatcttacatgtatagcaaaggatgacaaggtaaatgtataataatattatctaatattgttgcttactctctgccatacagtgtgctcaagaaatatttgttgaatgagtgagtctttaacaacttttcttttttttttgagacagagtctccctctctcacccaggccggagtgcagcggcacagtctcggctcactgcaacctctgcttcccaggttcaagtgattctcatgcctcaacctcccgagtagctgggactacaggcatgtgcctgtatttttagtagagatggggttttgccatgttggccaggctggtcttgaactcctgacctcaagtgatctgcccaccttggactcctgaagtgctgaagtgcccagtctttaacacctcaaaccgaattttctgtgttacagatagtgggcattgtgtgagacacccaatgtgatatacccgaaaagaagcatgtgattacaggcccttactcctcattgtaattagagagataaagtgtgtactgtggccgggcacagtggctcacacctgtaatcccagcactttgggaggccaaggtgggcagatcacgaggtcaggagatcgagaccatcctggctaacacgaagaaaccctgtctctactaaaaatacaaaaaaattagccgggcatgggggcatgtgcctgtagtcccagctactcggtaagctgaggcaggagaatcgcttgaacctgagaggcagagattgcagtgagctgagatcataccactgtactccagcctgggcgacagagcaagactccatctcaaaaaacaaaacaaaacaaaaaaagtgtactgtacattgaacccagaaaggtcaatggcagagtgaggtggggtataagagccacaggaaagtagtgacaatgaatgtgaaacccctgtggactgaagtttttgcatttgtctctttgtaccaggaggagccattggatgaaagctcagtgaagaaaatgatcctcacatttgaaaagagatcatataaaaaccaagaattgcggattaagtttccagacaatccagagaagtaaggttctgttccactgataccatgtctcctctgtggcgtttcgttggctaattttgttttgattttggtttgttttggcttttgtgatttgggccaggaatcccaggatgacccccatgtttgggaattcactagaaggactcccaggactcaaagtcagtgatactcagggctgtggtttattacacagggcacacaacaggatcagcaagagaaaaagacacatcaggtggcatctggagaaattcagatacaggcttcctatgttttctccttcccagtgggtgggattatacaaacatgcttctttcttcagcaatgaaatgcatcaacatgtgtgcagtgatgctgtccagggaagcccatttcagactctgagttcagggtttttatggaggactggtcatgtaggcattctctgcctgtaataacaataacaaccaaaattgtaggctcctggaaggaaagcagctgttcagtgccccgggctgacaaagcagcaaccttatcacttagggaacatttcaaaagccaaattcctggctgccagcctagggccagccttgtaagctagcccttttcaagatcagccccgcagttaacatattaactctcctgcattattcttttcagtgcccaaagaagactgatcgtgcctgccgttagtgatagctttactgtggagatcatttcagaggctctgaagttagacagatattggtgtgatacacacatccctttgaataagttacttcccctttcttagccttgggtgtctcatctgtataaggaaataatgccttcctcacagggttgtatgaagattaaaggagaataatgtaagtgtttagcttagtacctggcacatagtaggtgcccatgagatgatagttaacgtgagttttactacactggcaccttggtgcactatgaagtgctatgtgaggaatctggcatctttcagtcagtcttgaatcctaaccaaggggactttcacatttatacgattttaatgttctaaacctctctttctttccctatctttgtccctcccaggacatacaattttaatgaatcttaatatgcccaaggcccccaggcaattaacaattgagtagtacaggctttgcactcaagtttttaggttactagggagactgactataaaggcaaggtagaaggaaacagacactttaaaagagatataataggagaagaaacagtaaataccaagttgggggctattgagggtgtcacagaaaagatagtagttgagctgggccttgaagattcatttttattaggcggaaaagaacacaggaaggcatgccaggcaatatgaggagcatgaacaaaggcacagaggtgtcagcgggcacagagtcttcatggcaacctagagaggccagcgtggtcaactatgttgtccctgtgctgtggatgagaaggcagagtggggagaatgtggttactgggcctagggccacagccctctttgatagtaggagtagctattaatagatcagggcccagcttatccagcattagagtcctatcaggttttgtactgatctccaccatacaggagcactgtgtgtgtgtgtgtgtgtgtgtgtgtgtgtgtgtgtgtaattacacaagtaatgcatgaatagattgtcattctgaaaataccagtggtacatgagtagagtgaaaaatgaaagttttccttcactactctgatccctttccattcctctgcctagaggaaccttgtgaacagttaattatgcaaatgtatttgtttctacttaaatcatactgtgcatattctgcaccttgattttttgggtcatctaacagatctgtccaggtggtacatgcatatctaccttgtgtttttttaattggtgcatagtatttcatggtttggaaataccatgacttatttaattattttctattaatggacatttgattattttaaaatcggcttttatgaaaaatgctatagtgaacctacttgtacatgtgtctttgtgtgcatatatttccataggatagatacctaaattttgaattcccagattgaagggtatgtacattttaatgatagctactgccaattttctcactgtatttttaaattctccccccagcagcagcatctcttttcttgtgttcttgcccacaatgcatgtgatcagtctttaacatctttgccatttgttttgttgttatttctgtactcagtggttcctgcattagactctgttccttttaggagatggacggtgtcttgtttgtctctagtgcctaccacagtacttgccttgctgtaggtgttcagtaaacatgagagagctcatgtagtccctgtcgtctttattacatccccattgcttgaacctaaggatacattatgaggaagctatgctgcgggtaatgatactggaaatttaagaaattcagtttacttctttgaacaccagtatttccttcgcccgcttggtagatacacgtctctcaatttggagcagagtttctgcaggttatgttcaccatctacatcttaggtaccttagtgttacagttcattaactgggtttaagacaatgtgattttatttaaaaaaatcggtagtgttttccattcagacaaaatgtatatactattttagttttaaaatctgagcatatgaaaattgaaattgtgcataaagaacttttttttttcatgtcgaaaagcagttaggaaactacattgtgttttaaccttgagttcttgaattctcactggtgcagtgtctttcgtaattctctagatcagcgaggtgaaattaagatgaaaattgctagagtgtattcggatgaaactttccggttgagatcagaaacattcaaatttattttcccatatatccaattgtcattttgatcgcatacccaaaaatgcctctcttcatttgactgcatttgagattcagttgacagttctccttatgcaccctccaatttgcactgcctgatctttctcctaaacaccacattgactagagtgtgctgtttccctagaaagtcctttaatagttcttctcttcatttttgcagggacagaattacttagtttactgattttcaacctttttggtctcaggatctccttgtactcttaaattattgaatatcccaaagtgcttagaaaattctggcaaatacaagaatagacaagcacacatttcattagccatcagggcagtgatgtcatcatgtcatggagcccttcagaaaactccattgtacactcctgaaagaatgagagtgaaaaaggcaaatggtgtcttagatttattataaaatagttttgatcttataattccctgaaaggatctccagccaccccgctaccccatcctggggtcctaggactacactttgagaactgctgatttacttggatggagggagcatcatgttcccccagcagtgattgcatttaggacttaccaatttctgtggctttcccagtgtttttgaactttgctggtcatttgctgatattcacccttgtggttgaaggagaatatcctgctggtctgaagcaaatgcacatgggcagcctaggaaaatattctctgtcatattagatggaatcgatgaccccatctcagcctgggttactgttttaatatgttgctctattgctttcccgtcacctctaactttatcctttcccccagctgtgagtcatctattgctgaaggtatgcctaattcctaaagacagttctctgcaaatagtagtgtgtgctttaaatgagtaggctcatgagtaggctgtgcttggtcaggcaaaacagaagacgactgttataacaaacttgagggtacatagattcattgagtacttgtatgtgccagctattattaggcactgtatatatattatctcttttaatcctcactataggaagataaggaaatcagggtctagcaataagttagttaatattctgtgtcttccttgatcaggttgggacaccacgctctgtgttccagtgacacttctcttggtagtaccaggcatgcttataattaatggtttgtaatagattatttatatttaatggaggccagaaactgggattattttatctgttatatcctcagtgcctaacacagtgactggcacctagtatgtgcctagtaaatatttgtcaattcactgttcatggccacacctctagtaaatagcatggctgggagtatgacccaggtcagtctcattcccaagtccagcatttctcacggtatcttgttactcacataacactggacccagtatatttttgtaatatttccctgcttgcagttttattctctgcttgtttgttttattttgataattttctgacttcctaaacttaaaagcactgggttaagaccatatttggaagaagaatttcaaagttggaaggaactgagaagcacagtctattctaccatctaactcttggtatttttttttttaatgtcatcctttattaactatcccagtgagaaggatctaactttccaaagaaagctattccatcatttggcagctttgactcttaaaatttcaactcagaatgagaaagcatttcaacaaattcttatatgagatgtatctagactccttagaatcttggttgtttccctgaattggtttccacatccctcctaaaagatggttccttgaacagatgtcacaaagttttagggtcattgaatcagcataactctgtattgtcctcttttaagtaccctaaaaccaccgtagcacttgtggcagctgttttcatctgtgcccccatttacaggcatctcccaagtttctgtgttggaccaaggcctgcgtcaggtgctggatgtccagagatgaataagaaattgtctctggcagaactggctcatgttctgatttgtattacagttatggttcaataaagccatcaagttcagaaagaaacacatgtgcccttatgaaactgtatctctcccagcctttacatttgtacttgactttttggttcattgcagttttctgtgtggatcccaggtatttttcctttggttagatttggcacatcattattgcctgtcaggaacttttgaattgattctgtcagctgctgtgcttactgtctctttaagctttgtgtcatataacattttttcattttgccctttatctatctttgctcatgttattgattaaaaaaaaataataaaatacttgatctaaacaggcctaaggacagacccctccaggtgactaacaatcgttcaattactttatttatttattttttgagacagagtctcactgcattgccgaggctggagtgcagtggcacgatcttagctcactgcaacctccacctcccaggttcaagcaattctcctgcctcagcttctcgagtagctgggattacaagtgtgcgccaccacacctagttaatttttgtgtttttagtagagacggggtttcactctgttggccaggcaggtctcaaactcccgacctcaagtgacccgcccaccttggcctcccaaagtgctgggattacaggcatgagccaccacgttcgctgtcgatcacccaaatcaccagatcttatactgcactcagcacaatttttttttttttttttactgtttagtgcccagtctcccttgccagttcttccaagtgaactggaaaaaccttttgtcaggttgttctccagaaatcttgtatacactcactcacataaggcaaataagccttagaggtttgttgaggcctttgggttcaaggattatgtagatctcctggcccatggaatatttgaatccttctgcaccagccttactgagtcatgattctgatttagcttccacacttcaagtgatctaaaaaaataatctatttgcaagcagagaaggaagccttttaaaaaaaaggtattgggggaaaatcttgctaaaatagttatgaaatttacttggaataataagtgagaacaggcaaggaaacactgaaaaataaaaacaacaagggagttgtttgcagtaacacacataaaacatactataaagctataacaatgtggaagtgtggtcctgactcaggaatttacagacgaatcaatgaaatggagtgaaaaacccagaaacagaataaagtacacattaaaatttagtgtatgatagatgacatttctttaaatctctggggaaagatagattatagtattggagcacttggccaaacatttgcagaaaataaagttagatttgtgccctatatcaatacattaaaataaatttcagatagattaaatatttaaatatataaacataaaaatacatcataaaatatatcttcttttagcacagaaaatatcttgctcaggatacatgtaaaatagagttcataaaggcaaagattttgctacttgaactttttaaaacctttatgtcaaaaggaaaaaaaaacctttatgtcaaaaagcacaatgtacaaattaaagggcaaacacttttctctgattattttttttgcagtgtaggatagagattaatttccttaatatacggtgtttataaatctataaacaaagtgagcatcctaataagaatgggcaaagaagaaatacaaacagtaaacattagaagaatgttaaccatcttactatcagaaatgcaaaatacaaaatgagttgtcttttctatctcaaattggaggagatactgtttgtgaagagggtaaggggaaataggcacttcatgcactattggtacttttctggcaaaatatatcaaaatctatttaagtcatgtgtactctttgacttgtccctttccttcctgggaatttatcctaacacagtaattaggaatgcatacatcttagtgtcatttgttaaagggaaaagaaatggaaattatctgaatgcctgacaaagggggattggttaattaaatcacagtacgtctactcaagggaatattgtgtggccattaatctatgacttagaacagggattgtagataagcttaatcggccacacccagcctgtgattgattcatagtctcttcttggaacactgtgttgagaaggattctgaggccagccatcttggctcagcagggaagagtgctgtggtgagtgagggattttgccatggagaaggagaaggacccatagcagtttgtcaggtattggcttctcctattgtagtagaataatgataaggggaattatttagcctatattaacaacaacagcaaaatgaatatagaactatatactatataggcttactttttggggggaaagtctgtgagttgagaagaatgacttaaacatacaggcaaacatacatggtattgaagcggttggtcaaacattcacagaaaataaagttagatctttgccttatatcatacactgaaacagaatttaagagtctgtgagttgagaaaaaggcttaaacataaagagtattatcaatggttatttttggttagtaggcttatggataatttgtttacatttttgagggcttgcttttctttctccggttttctacaaaaagtatactgtaattgggaaaaaatatataagcatatacttaaaaatattaatggagaaaaacagtaatagaaattgtctaaaatatgggcatgttttaaagaattctaagtctctagattttgttgcttaccgactccagatttttggagaagctgtatctacccagccccacagcatctggaagttgatgagtcctgtgtgacttcaagagtccctgcttgtgttccttttctttgtgccctcaatttaattcagtaggcatctgtggatataagagacaaagatacatttcctgtctttaagaagtttactttctagaagagaagacagacatattacagtaatagtagcagcaatagtaatgagaacaaatacttacatagtgctttttatatggtagacattgttctcagtgctttatatgtccttactcatttactctttacagtggccctgtgagacagataaccttattgtccctatttacagaagaaactgaggcatagagaggctaagtaggtggctaagccaggttcaaacccaggtagtctgactccagagtcagtttaaccactgcttcctctcagtcactctcagtcaggtattgttcagttgccttacaccagattagctcatttccatctcagaacaaaccttcctgtcttgttcatccaaggcttaatcggcatttcttgtatgtcaaacaccgggggagggcatgcagcgtgaatgcaaagtagttctgttcttagtgcctgggcataggtttgttgaaaggttcaggtatagaaatgtgagtaaagtatcatgctgtgtaaagttggtggtgattgtaggatgccagagactaggtctgcttttctttggtatctgcctctgaatcagctccaaagaggaggaagagggagggcatttttggatacagaaaatcttatcttctttggtaaggggaataactggcccttgatctgaagtgggaagtaagagaaaccctttttggatgggtagtaggataactatgttcagggcaacagagtgaattgccacaccaaggggtaatggtggctaatctataggactggtggaaagatcgtttagtgctacaaaatgcttcgggagcctctgaaaggcagcttgtgactgcaagagtaagggaaccctgtaatgagatctgaatccaagattgatttttgtaatgaggaaatcgatttcccaaggaaattgtgtgacagtatgatgtttggatgagtgtacttcttggttggtctgttgtagacactttgacagattgccttgttgtctagattgttgctgtttgctcctcattgctgatagtgcccctttccttctaatgatgtcttgttttccctcctaggttcatggaatccgagctggacctaaatgacatcattcaggagatgcacgtggtggccaccatgccagacctgtaccaccttctggtggagctgaatgctgtacagtcgcttctcggcttgctcggacacgataatacagatatcctttcagatctgacctcagtaggagagctgacatggtggggaagtgctgttactctttctcctgtctctctttgtagatgtgtgctataaaatctgatgttctgtttccattctaattatcttctgtcttgaaacacacaatgctttttactcatttgaaaacctggtttttctctattaacaaatcttgcaaatcttgggcaatccttaaaattgtcctatttgctcttattagtactagaattcatcgtgatatatctgttcatacattaacagctttacttttcaggatctggattggaaggccccttatgggggcaaagccagacagatttgaatgtgtaaatctaggcatctttctgctgactgatggtccagtggagttgagactagagatagtgaaccatggtaaaaagcacatttggatgtccaggaggacagggaagctgttctgttttgttcattcctagttcctaaaaacaaggctgagtgtggtggcttgtgcctgtaatcccaagactttgggaggccaaggtggttggattacttaaggtcagcagtttgagaccaccctggccaacatagcgaaaccctatctctaaaaatataaaaattaactggacgtggtggtgcacgcctgtagttccagctactcgggaggctgaggcaggaaaagctcttgaacctgggaggcagaggttgcagtgagccgagatcatgccactgtatgctactctgggcaacagagtgagtgggactccatctcaaaaaaaaaaaaaaaaaaaaaaaaaagactgagtacacagtaaatagcatttaatatttgttgagtgcatgttggacctaaacagacaatctaggtttgactctcaaccgcatttttgtgtgaaagacggtgcccttccacaacttgtattcttttttgcacagatagagttaataacttttgtctttcagtgttatttttatttttatttgtttttagagacagggtcttgctttgtcaccctgactgaagtgcagtggcataatcatagctcactacagcctcaaactcctaggcctaagtgatcctactccttagcctcctgaggagggactacaggtgcataccaccatgcctagctaattttttttttatttaattttttggagatggatcttgcaatgttgcccaggctggactcaatctcctggcctcaagtgattttgcctcagcctctggagtagctttccatgttactgagaggatcaaaggagtgtataagtgctgagcacagttcttgatacatagtaggtacttggtaaatgttacttgtcactgaatctgattcgtgacttccaaaaccattttatactttatcttggctatcaggtgtgcagtagctttattgcaaaggcttttgatgtgcctgtggacagggttatgttcattaaaccaaattctcttctagtagttgttctgtttgaatccagatttccaaaggtaagagacaaatgtagttagtctgcttgagtgatattcacagggaatctgctgttgcttcatgttattttcatctttctggtaatctctctcctgagagcgtgtctgactaagttcttgcctggctgataattctcatagaaataaatcagtgagtaattttaatgcaggcttcttgaagggcagtcttaagacatttctgatgcttcatgtaatgttagatagcatcaagaattgatctgttagctcccagatttatgactttgttcaccagggtttgctgtggggttctgggttgtataagaaccctagttagcttgctgctgagtgagctcagtgtatggtctcatgaaattcattcagtagagctgctgtgagtgctcatgatgtaccaggcactgtgctaggcccttaggaaccataagctgtgctggttgctcaagcagcatcagtcagtaagtatatattgggtattgtcttggtctatttgggctgctataacaaaataccgtaaactgggtggcttataaacaacaaaaatttatttctcacagttctggagactgggaagttcaagaccaaggcaccagcagttttggtgtctggtgagggtctgcttccaggtttgtagatagctgttttctcactgcgtcctcacatggtggaaggagtgagggagctcgctgtgtctctttttaggacactaatcccaagggccccacctccaagtaccatcacattggggataggcttcaacatatgaatctgtggggggatataaacattccatctttggcaggtaactgccatatgcctagctctattctgggcactaatggtgttcacagactcagtgactacgagttctggttgttacttcacatttcagttcacctacagaagggtagatttcagaatctgatcagaccttagagaggacttagctcagtaccttgtttgtttctacttagtgacaagtgtgaagtccagatgttggacagctaacttgaagttaagacaggcactccaggtctgtgattttcagtccggtgttcctccagtgcacctcaggtcttcctgtgggatttacgacattgctgacagagtcgcatggtcacctgttaccctgtatattattagtacagaaatgacttattttctttctggaaacaccactctcattcttttttctattcctgctaactcaaaataatagtagctgcttttggaagatactgacattttgctgattcaccagcctggctcctgccggggagaagactgacacaaaaaacgctgctcgacatcggcatatttgggaaaggcaagggcacagatgttccaagttgttaagttctggtctttaaaaagggaaaaaacacatccccctataataactttgacagattgccatttccctcctgttttctgagagctaaactgttttttttttcctcttgtatgccaacctgcacccaactgccctaatgatattttttaaaatctgatgtttaattatgtcttacatcaaatttaaagtgcatttgaaattttttaaattaccttaattttaattagaggcagcaaataggggtaaatgtcatcctcctcaaagtacgatttttcttgaaagtgatttcaggaaagggcaggtcctcttgacttgcatctaccatatcctctgttggtcgtaatgttgctctccctgcaacattgcactctgctgcttgtcttatctgtgatctataatagaaatttttcttcaggaaacggttgttaacaatttactgttgtacagctgtaactgcccaaaacaccttagcatgaataaacaatttcatggcagtcatgacttaaatttttaatcttttttaactcttcatttatcaaccaagaccatatatggctggttatgttcccagcaagcacaggtcatctttgcttcatcctcctctgtgaaaacataaactgtagggattttaattcaatcagagcctggtttgttgtaaccttaagaggcagaggatgtgagaaaacagcttgtgcctcatcctttcaaccgtgagaagcagcttcagagtttattctggcgctctgcatcactgctgctggtgagggcttgtcagcgcttctgtgcctcatctgcccccttgagaggctggagcccagctatcggttggctgcagaatggattctgatctgtgaagagcatatcttgggggtggggagcacacacctcacatggttttggagggttactctaaatgcagtcggaggcagcagaaggtggaatccagcagctgctgccttttcaaaataatgctttttaaacactttttcctttaaagtaattcattaaacgtgtttagagctcctttcttgtgaaccttttagagtgtttctatggaaaaataaaaccaaaggtacatttaaagatattttcttaaggtattgctaaaaaatccatttttgtggactgctttaagccagatttactcagttggcccaaaggaacaaggaggaataaaagggaaaaaaacaaaccacaacaacgatcacatggcaccaaattgataaatattctgtttttgtatgtcttttgccatgttcttaatttgagtggtcagttgagtcccttctaaagtttttttggtagatcactgttatttactgggttcttcctttgtatgctaagtgtgttggatgctaataaaaaataataactccagtttaaagcaaaaactctcaaattaccaccctcccccaccatggtgtgtgtggaaagtgccttgggaacagtatgctcaggaaacaccactgattggagccctgagaaggtgtgggtcatctctggcttgggggtgtggggagtggagatgggtaagcttttgacagacatggagattagcatgcatttcaggtttatttttgtagtctctccctttgcagtggaaattgccattcctcctactccggatggaagctgatgtggtcttgctggctgcccatgtagtcactacaaatttatcaaggtatcgggtccatggcttaattaaaaaaaaaaatcatgactactgcttcccagctaaatgcctttattctttaataataataataataataatccagtaatctaaacccaatttattcaaagtcagctttctctccacccctttgtgagacagaaaaatgaggtctcattgtgatgttaacttaaggcaccagtacattgggttgcatgctaatatttaagcagggaaaaatttttaagtggcagagtagatcattgtgctgatggggcagctctttttggtgtggaataatttagggagtggtcattaacactgttcttttccaaatgactgtttagttttcttctgattctagaaaaccaggagaacttacagagttgtcaagtgagttttgtgaagaattactgtgggaattcggaaaatacggaggagacaggttttttagaccaacagggatcaactgaacttgagtagtctgggtctgagaatactaaagtggaacaaactgactgagacttaccgtgttatcccagaaggtgcgtacagtagtcaagggtgccttgtgttacagacccagtgctaatgagcaagaatagggctgggaaggatttgagccccctaaggggctttcttctaattggactgggagggagttggtatttgctccattgctgtcccgtaagcactgtctaacaagacttacatattttgagctgttattttgctaggagctatatttgtcttgatatttccagaattaaaattacatttagaagaatttacttctttttctcatctgtcatctgacttccttgatatgtattgataagccacttattttttggaaccaattaaatgtgctctgaagataaacatcttaggttaaaagtgccaaaatggcaatgtagaagaaggatcttttaatgtaacttgaaacaaacagacaaacacacaaaacctggtaccacattaatgtaacttttggtcttgtttatgggttttaggtaaaatctatgtccctggaagattagggtggttgtagcctgccttggacatttcccctgtggcatgttactccccactggcatttaagaaggacttaataaatgttgaatgagtacattttctccttcatattagtttgatctaggatggggataagagtccaggttcattctaggtggctttgtgccagctgctttaaaaggagaaaaagaccattttgtctgttttgaaattcatctgcattaattgagctatatctaattactgtcctagtctagaaattaaagaaaagatattttttaactcacatttattgcattaatcagttatattctctgaatctatactggtttatttgtcttaagaaagcctttttgaaatgacttttaaaaagccatctgcttaatacatcttatttctcttttttttttttaataactttgttccttgtggagtcatctcattggagattaatgagattaatgcttaatttctgtaccaagactctaagtgggatatggctccaaaacaaatatccacagccaaaaaatagaagtaaacaccactctttttttccaagagccattgtgttatggaccatttcgtgcccagctggtcttttctggtttacctattattacactaacttattgccccagtagtggacaggtacagagggagtgcgtgggtggcctttctactcgacatgacaaaataggctatcaaaaactgtgttttagtaattcgcagggagacaggctctctcttttcctattatacttggacagaagagccttttaccttgtgaaatgaaattgtaactacagaggaaaaacctatcacccatgcccagagtctgcttgtgaagaaatgctggagggatagccaaccatgctgaattttctcatcaagattgagagtttgtctgtctttagttttgattctcattcctctttctggtcttcaaatgacctctgtctcctgggtcatattgtattactcaggagttgatgatgacaattacagacttattactgccttgctgaaatgctattttgtgaaagttgggaatttatataaaatcagttagtggtaggattgatgagatgtttaccaggcctggtaggtagctgatttcttgtttgacttctcaactgaggcaggaaagtaggcaaggagataccactgaaatatgataagaaacaagttttcctggaaaagccatttatgctcttctataaaatcacttttgtctaaaatgtttcttattttttaagtttctaggtttcatgtgacacatttgtgaacatggtataagactaatcaaagaaaaatgtgatatctggcccacaagaccttagaggctgaaaaaggacttgatcaatctgaatctctgtggcatagctgaaatatgaaattaggtcttccaacccattgtgacccggaaaggggggaccatgctcttgttagcttaaacttcagattttagaggcttttggaaaaatgaaggcaatagtgagcgctttgggcattctgtgggaagacaatctgtattatagtgctttcatagttcttgagtattttaacttccttggcctttgacatacctgatctcatttattccttatagctactcagtggaagaggctgggcagagactattaccctagttttacagatgaggaaattaagctgtagggaaataaaggagcttgcacaagattacatggctggtgataattttgggaccattcaggtcactaaagatgtgaggcaaagatgaatatgacacgaccccagttttacagatgaggaaattaagctgtaaggaaataaaggggcttgcacaagattacatggctggtgataattttgggaccatgtgaggcaaagatgaatatgacatgacccttgtcctcaagcttgcattgactcttcatctgttggtctttcagatatactccacttgtctttttgaggctactgtttaataatcatcacatactagttaataagtttattaactagaatttaatcatgcatggtgttattcaagagatgtaatgataacactacttattgcattattgcatgctgatttagatccttgttctatagacatcttatttatgtatttatttatttgcttttttttttttttttttttgagagactgggtctcactatgttgcccaggctggtttcaaactcctggactcaggcaatcctcctgccttggcctcccaaagtgctgggattataggtgtaagccaccgtgcccagcccagttgtcctgtagacatctgactccacagtgggtggatgggtggatggatggatttaggtgaatgttgctatgcatattaaataagcatttgaatggattatgaacttttcaagagaataaatatgggagtttcttggaagagtggggaggtgttaacattttattcttttccttgagtcttttactaatttatggtggaattaaatgatagttcttttctctgtggttacaacagggtcaatagctagaattaacctgaatgtagccgtgtttaaactgagtgtatatccccttatgcattaatatgaagtatagttggcaatagcattgttattgaaatcagatggacctaacattctcccttactattgcagtgacctttagataacttttttttttttttgagacagggtctcgctttatcacccaggctggagtgcagtggcacaatctcagctcattgcagcctccaactcctgggttcaaacaattctcctgcctcagcctcctgagtagctgggattacaggcatgtgccaccacacctgtctgatttttgtatttttagtagagacaggtttcaccatattggccaggctggtcttgaactcctgacctcaagtaatccgcccacctcggcctcccaaagtgctagaattataggcatgagccaccacaggccagagatcttaaccactactagctttacctttcttatctgttaaatagtgcttacaccgaatcttataatgctgctgaaagaattccagtagcatagcaccagacatgatgctgtgacttttaaaaatggcggctattattatgacaacttttaattttagagagggagaactactaattcctgctagtcaagggtagctctagggtttctaggggttagtttgctaacctggttatttttgctgttttttattataattgattcaaataatttgtgtgtttcggtttactctgtatcaggcatatatgttgactctgtcaacagctttctgattattttttagatgaagatgctaagcatgaaggacttttgtccaaagacctttaagctctttactcatattaagttttgggtaaatatcacctttaagagtgaaggagtaagacacagaaagcatagttaattattcgtgatggtcagctggtcagttagagatgagtaaagcaaaccttcaagtaatttttctttcagcaaaagacctgcatgtaatacccagaacatcagtcatcagctagcaagtcctgtcattcttgttcttatattctgcatcttttattttttcttttaagtgaaactgccctgattctgacctttgttgaatcttctggattctgttgtatgtagtagctttggaataggtctttctccttcaggcctggctcccacaactacccacacatgctgtccacatggtggctcctgtgtgccacccccgtccctcatgctcaccgtgctttagtgcgtcctgcacacagcttttagcttattctttccaaatactattttcttcagctagttacaattttctctcccttttccacttccttcccctctcctccaatcctttcttctcttcaaatgcctttgtacattccagtctctctgcttttattcctttggttttgctttctagtctccctgtcctcatatttttagttgcctgttttctgagcagtcttcttctagcaagtcataactaattccccagctccatctgattgctccttttcaggacgcctgcagttcatattgtctgtgtgtattcttcatttgttacatgttggttatgtcctgtggtgtatggtttttaaaattgttttagattatctatctttctcattttacagatgaggaaactgaggcccagaatgaagaatggattggcctttatcatgttcagtactttagtcatcatgggcattcaataaatgcagtttgctggagcaaggtgtctgtttctctctctctctctctctctcccccgttgtgtgtgtgtgcacccgtgtgtgtatgtgtgtgtgtgtgtctgtgtgtgtgtgtgagagagagagagagggagttttaaggtgagggaaaggaaacttataagtttagttctgccacccagtttccaaatataactctttctctccttcatgttttcttttctttatacttccctttcttttcttttctctctctctccctttcttttttttttttttttttctttgagacagggtctcactctgtttcccaggctggagtgcagtgacacgatcatagctcactgcagcctcgatctcctgaactcaagcaagcctcccaccttagcctcccaagtttctgggactacaggcatgtgccaccatgcctggctgattttttttttttctaaatgtttagtagagtcaaggtctcactatgttgcccaggctggtttcaaactcctgagctcaagcagtcctcctgccttggccttccaaagtgctgggtgttattacaggcatgagccactgtgcctggccctgtacttccctttccttttcctatttttgcacaattttaaattctgtattcttccttttatattcacagcagtgtgacatttgaagggacagaggttggtggggactagcccaattccatataaatttttccctttgttttcaaccaattatatcatgtcctgatctctgaagactccttggtgaacatcagccacctcttctcagaaattattactgccttcaaaggtgaactgtacaaggtagttaagattatactgagtttcaagaatttaaattatgagatgaggttgagggtgttggcctatttctcactggaagtgacttcccaggcgatctatttaaaattttgaaatctgtgaaaattcagtgaacctgtggactaagcagccaggaaggcagcataaggcaagagactgagtgagtcagttaacatttaatgaacacctgctgtgggtagaaccttgttgaagagatgttaataaaactggagtctattaaaggtagatggtgataaagcaattgatgaggaaacggaagggaatcaaggattaagaaaaatactggtaccgtttcagtatgtgtgttatacccttaacatttttcacatgtgtccatagctgtggtcgatttgcttcaggaattaacagatatagacaccctccatgagagtgaagagggagcagaagtgctcatcgatgctctggtaagttgcacatcctctggggttttgcaggtttgtataagttgttggcattgccaccaccatcgtctcggagagtggccaccaggtggaactccacggcaaggctggagtgtggtgaggctggagtgaataaggagagtaaaaaagtagagatgtggctggggcagtgctttatgctttgggactgtgtcaggtagaggcctcgcccttattaagtctctgctgtgggcagggccatttctcattcttctcaccacatcctctcacatgggcattattgctattatttccatttacagccatgaagctgtgacttaggccaaacaaatggcccatggtcacacagccaggatttgaacctgtggtctcctagactctatgttttctgcccctttcttccctcctctcttttgttgctactgacctttttacaaagagctttcacaaatgtttttctcatctggactttctaatcccaagtgccagtgagaacaggtattattattattacttattttacagataggtcatcagagaggaattggagaatgtcgaaaataagaacaaactttatagctcattgaggccagaatggcattccctgcctgtagacgacaaggcagttgatttctgccatcttttgaggagcctaggcaaggcctcagaatgttccttagctattgatccacacagcagctaacccagaggagttggtctgtgaggcgcagctgtgaccaggtgccagctaggcaaactgccttacatgtgaggaaacccagctgcagaagtgaagcctcccgctgggtcgctcagcccgtcctgtgacagctgataaaagagactgcatgttctgatccccaacacaattctgtttccactgccccagattccccagttcactggtgatcagaaagggccacaaagctgcaaaggcaccccagctggccagcggcagaagtgcatctagtccagcccctaccctgataccacctgtggagctctgtccacctgcagagctgtatccctcctcaaggctctgtggattgttcttcttctgttgtttctcttgtcttttctctctggtaagaatgttagtattggttttgactcagttagcagttgatcaaagattactccagccactagtattagaagcacctgggctgcttgtttggctactttctagtcctacccaagacccactgaatcagaatggctgggcctggggtcccagatgatcccgaaaccccactgctacactgcccaccccctcctcaccctttctcataatgttctcgacactagaaatttcccatgtgccgtgcttgctgttggcatttggtgtgaatgaaggggttgtgaacccactggttatgaagaactggctcttacagagagtgaggctagtgtccagcagggccatttatgaccgaatataatgaaaatttctatggccatttttctttcaggctcctttagagagcaaactgctacttttgtagaattcagggcatttatttttcgtttgaaccactgtgcagaaagaagaggatgatgttgggatgtcgttttgttttgaggggcgtctgaggaaagactgtggcacttgctcctactctgtgtccctgcagtgtcgtttgtgcagtcttaccttccagaggttaattacatggccctgaatgagccttcctgcttggtccctgggctgattttaattaccatcctttgcctgtctgaatagggaagacgagagaggaacagctagcctggctgttgcatgtaaaacatacccagaaacagcaattcactcaaaagccccctttgttttttctgtgttgtcaagcccactgacaaaagctgcatcttggcagattttattgtttgtttggaaagaaacagttcaccctcagtctggggagccactaggtaactgctatacaggatgttctgtttgtttagtttagtttttatttttattattattatattagtttaagattttgactcttacaggtttatcctggtggggctggtaggaatcacaagcattgaacattcctggactccagtagattatttgcttgtctgcaaccagtcggaagtcatcagtaaatatcagagaacagaaccagcggtggtcttccatttactttttttactcttggctgcattcaggaagaaatttgataagtactctcatattacaagggttgagttgtctttgtagttttaatttgaggccaatatctgaggcctagaattgcacgagcagaggctagagggcatgtggcagaatttattgtggtgtgcagtttgcagttattgctttggtctttttcccagttggaagtcctaagcaataggatggcacatttgtggggaaagaacactgtcctggcattctcagggatcttcggggttttaaaatttggttcatatccactgctgttacttacgcaaaaggcaaatatttgtgctttgtaacaagttgatctggtagcctggaaaatggactcttttctgaagagtggtaagcgagagggtatattgctttgatggcaattctctggcttacctctccaaagatgactttggacttcttgagaatgatgattaaattacagtcatttttctacttgccagtccccaaacttgccatgtgctaggtagtcccatgccttcgctcatgctttgccttccacttgcctagccttgcttctctggggctacctggaatactacctctcatccctttatctcttcccttttgagttttttccagactcatcacctcagcaggatgtgttgttctagcactttgtacattctggcacttgtcacattggattatagatgtctgtttataagtttgtccttcctgaggtgtgatccccgtcaggggagtggtcagagcagtgactttgtcatttaccaattctgtgtccttgggaaagttactaacctctccatactgtttctttctctgtaaaatggagataacagtagtgcctatcatacagtaccaaagtgatgaacaagtgagatatttaataagtctttagaacagtctggcacagagtaaacacctgataaatgttggccattatcattataaaggtactatgcctggcagatattaagcatttagcaaatgtcaggttaaaattgtatgtatcatctaccacacagtgagatgtctgtgaatattgagttcacaaacatttttttcagtttaaaaaatatttcaaaaacattttgaacaaacactcaataaaaccacatttggatggggtgggcctaaataagaaatgagaggatagagctttagtttaaaaaaaaaaaaaaaggaagaagtaagtaatgataatacaaggcagaacattgaaaacagctatgagaggggcagtgttctgtggacatgaagagagagtgctcgcttctgatggaataatcaggaagggctgcagagatgcaggcatcggtgatggcctctgaaagggggctttaatatgagagcatatggaggtgtcccagccaacagagatggaagtgtggctgggtggtgtagctggccagtgtctaggagccagcatttgctttatagaaacgctttatagagttccacaaaaagtggctttgatgtggactgccaggggactaccctccatactcattcctgcactaaattaactctactgaaatgttaaactttgaagccctatcttggtttgccttggacttggttggcaatggatttgtgctgcccaggtgaggctgaggttggccaggtttatgttgctgtaagggtacttactatgaaaattcctggattctattccttcccatttccattcatgttctcaccttcatctgtatttgttccaaagcaaaattcatttgttcatttgttcactaaatgtttattgaatgcttgatgtgttcctgattgtaggaaccagctatatagctgtgagcaagcctgacaaagcctctgcttttgtggagctcacaaggtatgagtgtagggagagacagtagatacataaacaagaaaactatcagagagtggttctctgtttaagagaattaaaatagagtgatgtgatgtagagtagctgggaagtcaggttggattaaatagtcaggcaaggcctgagttctggaagaaaccagccattcaaaatgatcaagagcaggatgggaaaagggcagaagacctaaggcaagactgaggttgacatattcaaggaacagagaaggggccagtcttgttaatgtgcagctggggcgaggggagaaagcagagtcagggccagaccacgctgggctctgtgggccttggtgaagaggttgggtggcattgccagggtgaagggaagtaattagaagatataagcaggggagtggtgtcatagcctgacagcattttaaacagagcatctagctgctgtgtggataatggactggaggggcaagaatggaagctaaaaggttacagctaggatacaacaggcctgagttttgcattatgaccatgttaccatattattctcaaaacttgtttgatcaagattcagtgggtgtggggttttattgttattactgtgttttaaatatgaaattcctgaaactcctagtaggcagaaaaatcccaatctcattcttgagaaagcttattggcagatcgtaccagatagaaaaagaagcctccttcaaaccctctcatctgtctcttttttatttcctcctcttctcttatatccatcctctttggtcaagtggaagatgatgtgtgatcatgcccttgaactttaactcccggaatattgtttgggatgcctgctaacaatcagaaataacaaatgacttagcagaaaacatcacaccccagacagtcctgatttccaaggcaagggttgccctggctgatgctttaatccctaagcaggatttgtttttagtttcagactttgtcacaggtccagaaaattgaaggtagacccaaggggttagagggaatagaatagaatgctaatatgtacttttactgagcgatatccagagctatgcataatataaatattttttgaagggttttctgagctaaatgtattttgactgcttttggccttcctgcaatcagataaaattgcatttaacccaactaaacataaagtttcacagtttgcaagcttaaaaaggctgcctgttagaagttggatttccgtagcaagaagaaagattttcctccagccagaggcccattatccataaccattcagctctaggacttaaatgcattgctcactgacagtgtccccactagcttctaggcagcagagatgggaaacataactaagaatcaaagaaaggagggaaaataatgcaggtaaagcggcaataagcaattgaaattggtgtagcagtttgcagaactggcaagcagtgtgatacccagtggagtggcggtgtctgctgctttaggattcagggagattataagtcaatcagggtgatttagggaaaaacatactgtgacatggttcatattttccccccagatgtttttctgttttctctcacgtactcaaaatgtccagttaattaaggaaaacactgtagtggatttctttagtgaagcttttgctggctgtgagatttgagagcaagattgtgtagctcttggcacaagatgggaaaacagcactttcctgtatttacaggctcccaaatctggcatcagtgtttcttcaaatagcatcccctcctttttcctcataccagggcataaaggagagcctagaaaaatctaattcatttgtgattcaggtatcacaaattagtcaataatttcacctttcccttgtccgtgtatttcccttaagcctcacccagacagagtaaagagtccatgtttcaagatctatgccacctaccattgcctgcctcctcaagcttggtttgaattgtgtctatagaataccttacacgcaaggactctggaagtattggttggatgagatcgtttccttcttttttctccctccattctctcccgtcattgaattaatgggggattatgggaaaaagtagagttggagttgggcacttctgccaccagctttgtgacttcagtcaggctaattaacctctcagagcctttactttctcacctgtgaaagatgtgagaattacatgaggataaatggagcaattacagtgcacaaactatgtgttccatcaatttatttaaatctagcaagatttactgagtatctgccgtatatggcattgtagtagacttggggtatacaaagatgaatgaagcaaggtgcctgcctttcaggaacttggctttttcttagccagtggaagagaggaactgtgaataatcaggcatcaacagggtaaagggctagattcaaaccttctgcttgattctttgaggagctgccatgaactagacctagggtaaggcctgttacatattttcatttactctttagcacttatccccatttcataagtgaggaaaccgaaacactgagagggaggataacgcaaatatgcagcagaccgtgtcttcagatgtggctttacttattggctgtgcttaagaatccattaccagatggatcatcccttcctgatgatagaaaactagatgtttccttagttatcttccttggtgtgcctcagggctacctaagggcagtctccttagaacacagattgtgcacaggaggtagcatgaagtagtaaaagcattatttcacctaaggagaaggaagcctgggttttgcctttgcctccactgctccatagctgtgtagtcttggctgagtcactaatgtcttgaacatcagctgtatgatgtggctactgaaagtttcctatctgtttcaacatgtgtgactccattaagagaaatacagtagctttctgtgcattcaatgtcatacaaatagaagacattttattgtgttgattattccttttaagagggaactataaattcttcataagtagtagtttcataaaagcttagcaaggaaacaggaatgttttgaggtcaacatagaatgtggctggtgcacattctagtgaaacatcttttggtgcattggcctaaagacgtgttttggcttgaatgaaccgttgacctgacttaagatggcattctcgtaaggtagtaccacagagaaggagaacgagcacagggcttggtttcagatggtctgtgttcaagtgctaacactgtcactcaccaaccttttaaccttgaattttactttgtctgcttgagctccagttgactcatctgaagttagagataatgatgcctgccttttacttacctcagggtcactttaagacttaaaagagataatgggatgggagagcaccttgtaaaccatagattgctgcttatttacttactttgttcattcaaatagtggagaagtaagtatgggaacgggaacattttggggaccattttatgacatccctctctccttttgcttcgctattcttgcaggtggatgggcaggtggtagcactgctggtacagaatctggagcgcctggatgagtctgtgaaagaggaggcagatggcgtccacaacactctgggtgagaggaagggtgcttgccattgcctgagttgctttgtgtttgttttgggactctgtgctcatttcccttccttcttcataatagagtcaatagcaggctgttttccttccttctgctcccaaactgccttctcagaaatgaagacctttgtgtaaatttcatataacttcagctttggtttggcttgtaggtaatgaaagcagaaatccactaagtaggtaaccttcctaaacaaaaaaccagtggctctggttagcgggccttcgcctccaaaagttaggatgaaacctatgctggttaattttgtttcctttggaatgtgtatatttaaacattttaaatccttttaagtcgttttttcttatcacttttctttcatggaactgcaaacttttggaccattctgtacctttgtaggacattttatttgaaaaagagtttttctctctcttcttaggtgtagactaccacgtaaactgtgatttgaaatattgctactacttggctgtccctacatcagattttcatttaagtggattcctctgtagtatttctcctcttccttctcctccttgaatctccccagtctttccttttgtaaagttgttgaaccgatatcctatttaaaattgtgttttgggggtagctctctttattactggtcactgtcttataaaaccagagatgacatatctgtaaacagagcttgagaaatgaacaaggcccagtggaagcagaaaatttgatgagattagattttttttttttagcttctttgtgtaccacagatttctattgtagttctggactctgttccctgaggattatcataaagaaggggaaacatgggcacctggggggaagaggaggaacacaacactctgtaatttgggttggctgtagtctagagccagaatttggcattgccatttgttagcagagtgctggattttgcggtatcaaaagtctgttaactgactgctaactgtctgttaataaaaagtaccagcctgccagtctacagagatctatttgcagctcggtcagctactaacagctcaggagagtcttccctctctctcacttattgagtgcctgatgtttgtcaggcactgtgctaggtactagggtagattatggtgaagtaggcatggttctgctcctgacagggcagacagataggtgagtcttgaaaagaaaggaaagacaatgctgggtgacagacggtatcgtaggagtcagtgaaaagcactgtgggaatgaagaggaagagcctccaaattgctggataggagcagctagctcctgtgcatgactgtggctgaatatgaagacaggtgcattttgacaggtggaggagtgggagaagggccttcatgaggggagtatcatttgcaaagtcatgaatggggctgggatttgaggaaagactagaaatggcctgtgacagtcagaggtgggagatggaactggaggaataagtttgtccagataatggaagaccttgtaaaccatggcaggaagcttggattttgttcgagtgaacaataggaagccatctaaaatataagcagaagaataggataaagtcatggaagattaaaacgaatgagttgatttttgtaggaaatggcagaaagtaattcagggtgtcgtagtgctcttcatctctcagggtttccttgctcctctgctcccacagcttcgtgcttcccctgcctggtcatcctttaacttgccactggggaggctgatgtgggcaaaggagtgagaaagaagacaggaggtgtggtgatttcttcagccctttctccttcaaaattcacacccaatgtgttctgggtattgtgtttagggaacacagaagtgtatctgtttcatgctagtaacatattccaggatacggattggaaggggggctgaaagaaatgaaaccatttgatattaaggactctaggtgattaaaaaaaaagagatctcctttttcgtatcatagtcatgcaataacttttttttcctcctaatttttaatttttctattaagcaacactttggctgttgtaggagatagcaggaccaattatatttgcttcctagtacctgggagttacctctgccagcatggcctttcccctctgtgcatgttattttgttcaattaaaaagaccatgcttgcctgctttgcaatattcttgcttccacctgatgcagggaaatagaactgcaaatggatgaatcaggaaaggaagcgactcttgagttcaccagaccctgagttttccctaaggcttttgcctagctcccaatctctttggttatgggtttctgggactcattagggactgggtgggacttcttaggtagatacccacccttttgtgtgttccgctctagtgttgttccctattagcatggaaaatctatcacttagctcttttgtgagttccatcattttcagttatgagttttacctgtagcataactggaagaagaaaaccacagcaactccctggttaatctgaaaatgacaacccagcatctggctgggagtaatgcagggaagtggggagaggaataacatgcctgtcatgggaagcaagcttgttgcagatggaaacaaagttgtcctcccaaatgactggtgtctgtctcccttcagctattgtggaaaacatggctgagttccggcctgagatgtgtacagagggtgcccagcagggtcttctacagtggctgttgaagaggctgaaggtgagtttggctgtggggaactgcagctcacacctgtctttgctctgggcttgattgatgctgggttattggcatagactgttatgctgggccatatgatctagtttgggaagcttctggtacctcttgcttctttcttctccgtttttgttcgttttaaaacaagaggctttaaaaatagtctttagtacctctgaaaatacaaacgttataaatacaaattcatgtgatacaaaaggtataaaactgaaaagatcccctctgctgatcccttgtagttccacttctcagaggcagtcactgttaacaatattatatccattctctcagaaattttctgtgtatatgagagagtgtgtgtttcacaaacagaattatgtaatattttcttatgcaagttgattttctcactgaactaattattgcctagttagtattccactatgctgatgtaccaaaattaatctcatcattcccactggtaagtttgtagtgttataaacagtgcggctgtgaatacagtagtcccctcttatctgtggttttgctttctgcgttttagttactcacagttaaccatggtctgaaaacaggtaaatatagtactaaaaggtattttgagagagagaccacattcacaaaacttttcttacagtatgttgttataatagttctattttattattgttgttaatttcttactgtgcctaatttagaaacttttttttgtttttttgttttttcttttgaaactgagtctcactcactctgttgcccaggatggagtacagtggcatgatcttggctcactgcaacctctgcctcccgggttaaggtgattctcctgcctcagcttcccgagtagctgggattacaggtgtgcgccaccacgcctggctaatttttgtatttttagtagagacggggtttcaccatgttggccaggctagtctcgaactcctgatctcaagtgatccacccgccttggtctcccagagtgctgggattacaggcgtgaaacaccgtgcctggcctataaattaaactttattataggtacatatataggaaaaaaacatagtaaatacagaatttatctgtagtttcaggcatccactgggggccttggatcctatcccccacagataagggagggactgctgtatacagactttttaaaatatacatttgtctcagtttatctgtacgataaattcatagaagtagaattgataggccaaaggctatgcaccttaacattttttgtagtattgcaaaattattcccactgatttatcatatcccactgataaatcagctgccccactgatttagagttatctgtttccctctgcttctagttaatctgatagtgaaaactggtattattttaatttgtaattttaacatcaagtgaagtgtgttggcttcttgttgattagccatttgtattcatgtcttttagcttcatatttatattctttgtccatatttctattgaattgttcattctcttagcatagtccttgtgattgtctttttaacagttagtattgtctaatagagtaaatgagaaaaagaagaggcaagagctcctctcagaacagtttggaccaaaggtgtgatgggaggcagtttggaactgcttatatgctattgaaatggccctcaggcaggcaaggatcctaactttttgtgagaaggaggcacttgtttgtaactaaagtaatgctctaagtaatggccttgctctgcttcagaatgtcacaagcatccagaaagtctggggtgtatcaggtcagatttgtcctccactgtcttggcagggctaaaggagaaggttctgcctaagatatcatatgctgcatggttttctccgtttctgacactctagtcttctccaatcctacttattcagccgtttgttcccattaaatctgtaaccttgatttacataacatattggcccaaggatgctcagctagcccagctgctaccatcagtatgagcacatttgcctagcagaggtcagtaaactctaactccctccaaaccccatccctcttgcctttcagtcttgcatccagcaagtagttaattcaggcattgtcatttgcaacttccttttgacctcctctcttgagtctaaatatcctttggttttagaactagacttgtttctcatttaatttcctttacatctctctaaactccgtttcttctttcctcagtattcaacacattttttattctccaaagccttgagacattttgggaacaaccagtggaggagaggaaagtagagcaccgagttttaaggggatggcgtagatgtcagggacctgagttgttgggggagtagccacacgttagggacgcaaccttgaaatacacaaaataattcaatagtttttttgtctctgttatgtcgggacagatttttccaagttacttgagacttaatactgattcagggatcttcattaaactagaatgtcttctgccagagtctttttttttttttaattggtaacataggaagggaaattgacttttgagtgtttggcttggatgccgttacccttatgatcataatgaaggggcccatttgatagtttagcaagctattgactcttgccacataggcactgcattgatgtaatcctcggggcacaaatagccatgttgctgtctctgaaacagttttcaggcttttagggatatttaaacatcaaaatgctatttgggttttttactggtaagcaagtgcttttagaagaaaactgtgctgcccaggcttaattaattctttcattaattagttaatgaaataaagtcctgcttaagggtgaggccagcaagagggcatgtccttcgcagcaatgccttgctcttatttctcataatctggggaatgttataatcttcattctcttcaacatcgtggtgactcttagtgagtactggacccagatcctgactttcccttattagctgtgtaattgtgggtaacggcctcttaacttttctggcctgttttctcctttgaaaaatggggatcatactccctgcccttccaatctcacagggttattgcgaaatcaaatatgataatgcttttaaattgtaaagaggttatagcagtgggtttcagctgggggtttgtattaagatcaccaatggaactgaacaaatacagattcccacactgtaccctagacctaccgtctcagtctctgtctttggtatattttagaaaggtttcaaacacatgtgattctaatgtacaactctcactaagatccacttgtctcaggaaatgtggaccttcttgttaaccattttactctggagactaatttaaaactccattttcactatgctattacccattcagaaacttacctggagtgatgctgtgccttctacatcagatcccaccttctctgcctcttacccaggcccagtttgaccttttcattttccagttttgaaacattggcctttgttaccttttagatacctttttttttttttaaacctatctcctgctctgcaaaggtcaaaattatcttgacctctgtgtctggctttgttcatactcccaactctaccaggaatgactggctcctctcttccattcgtatttctaaattttacacacccttcgtgaaacagcttaaatccctaatcttctgtgtagcctctatcacttttagaactgaaaggaaatctgtaagttctgttgtagataaaaaatttaaaattgagacctatcgatattaagtgccttgcccaaacccctgtagctagttagagatagagctaggattaagacccaagcctccagaattttcttcatgccccctttccatagtactttgcccccagcctatactgcccactttcttttataaaaaatcaacaccttcatctttttccaatgggttctcttgcaagagttggcctatctgggttctagcatctacccgtaactgtgtgatgctcgccctcatggagcatcttctctccatctgtaaagtggagatgactccatcacctggccaacttgaatattcttatgtgtgctgattttctttctccaaatatctctaaattttataattacaaggaccatgtctctgtcatatctgtacctcctcccagctgttctcaaactgtggttcccagccaggagcatcagcatcacctagtgccttgttaggcaaattcttgggtccacccagacccactgagtctgcaaagttggagtggagcctggtagtctgtgtttgttgctgttgttgttgtttttgttgtttttgagacggagtctcactctgtcacccaggctggagtgcagtggcgatcttggctcactgcaagctccgtctcctgggttcacgccattctcctgcctcaacctcctgagtagctaggactacaggcgcccgccaccacatccggctaattttttgtatttttagtagagatggggtttcaccgtattagccaggatggtatcgatctcctgaccttgtgatccgcccgccttggcctcccaaagtgctgggattacaggtgtaagccactgcgcccggcccagtctgagttttaataagccctcaagatgattctgatgtaagctgaagtctgagaaccaaggttctagagtaattatgtctagattgcttgataaaaccttacgatttgactgatcatctcatatttattcagtaatccttgagtgattcttaagtgagtggcacactggtgacagcattctagtgttggatttctcctttttgtactggtagcctagcagtatatagagatattcatggatctcttcatccaacaaatcaacccccactaatttattcttatgaggataaaaaccactgcagatgattgcattaaatggattaacaggtaagtagataacagtagtgtgagagatgctgcatcacaattaatgtttttaatggggaatacaagcttattaagatattacgtactattgaaaataacagcaaaaccaagtataagattccctcttgttacccagttaaatcaatgcttcagaaacagttgcagcgttcagttaagttatattacatgtacaactggttgatgctaaagttcttagcctctatgaccagaggttgggattttgtagggcacaatctgctttgacaattgtacagagctgtagatatgtctgaacctgccccatgtgttccaggtagcagaggtgagctacagatataacctgcagcttctggctgtgagtggtagcataattgttttgtactttccagaaaagcagcagctcccaaaaaggtgaagtgtaattttattcaaggctagtacatgctgagtacaaacctatgcatgactctataattactctgacagctgaaagatttaagagagccaggctcctggatagaagagagccctacaagttccaagtcccgctgattaactttgcaaaatccaagagactatacctgctaagtaaaatctcctttctcctgattttgaataaatgtctttgaaatttggcagtttggtattgtgcaatctctggctgggatttaaacagaaataaaatatgctttgtaagtgttgtctttggctagacatgaaagattactttcctttcttcccacctggcctaatttcttctatttcttttctaccagattaaaacatttggttgtcatcatcatcatcatcaccactaagttttcatcatctgatatgagtttcatgtattgactgctcactacatgctaaagtgtttttctagaaccttcttctttctttcctgtctttttcttctttttctttctttctctctttttttttttttttttttttttgaggcagggtctcatgctgttggccaggccagagtgttggtgccatcactactcactgcagccttaacctcccaggctcaagtgattttccaacctcagcctcccaagtagctgggacttcaggtgcacaccaccacacccagctaatgtttgtagttttttgtagagatgaggtctcactatgttgcccaggctggtcttgaactcctggggtcaagtgatcctcccgcctcagcttcccaaagtgctgggagtacaggtgtgagccactgcgcctggccacatacattatttctaatcctcacaaacagccctgccaagagggtgcagctatccccaatttacagataaagaaatcccagagagagaggaaatggtgttgcccaaaccacatgggaaccacgtgagagagcctgtgagcattgggccttggcatctttgaagccacctcctcttgccaagctgcttctcagctggcactgcttttaggttctgaagcattgcagagctcagcgttggggagttatcgggcctcatcattttggtttcctgattagattcttccttcatgccaatttctcagtcagaacttatattttaatttaaaaatgatgaagttatcagtctggtttttaaaaacttactttggttaaattggaaactcttagtagtgtcttacagcaaaaggtggagatttcctgtggaaccaagaattctcagtagcaagaaactcagctggtcggtgcctgttatgtatacaccagttcccttagtacagccacttcatgaggaagatattaatttggccagtctcatagctggtaactgttagagctcagattctaatgcagatatttctggttatggttgtcagaaaaacttgtggtacctactgtgtgttaggtactttcatattatgtttttaaattctcatagtaactctccaaataagtgggattttttttctatttcttttttctttttttcatgtcagtgcccttaatcaaaaaagtgctattttttattttcattttacagatgaggaaactgagactgagaatgtttcttgggtcatagattcccattgtcagcttacagcattcttagtgtctcagtaattctgtttttacagcaccgctatgccaaaaagtacctaatagtctcatttattaagtagttatgtccaaaccatttaatatatatttatgtccttacaatttattagccatttgagaagataatacacacaaattgaaagaaaaaatatttttatttcattcttaaatatcatagttacttcctaatggtatgtgtgccttttggtactgctcaaatccttaaaccttaggatcagattgaacgctacgaccatcattctgatttcacatcgattttcacagttatttttgtcagagcagctatccaaacgcagctccacaaagatatgatgtcaccagaagaaatgtaacttgagctcctggttaatgcagtgttcaacagatgtcacatttcactgtgttctccttgaaaatttaacatatcctgtggtgaattaaatatgacaccccagttgccacagcgcaaagttggagaactgcagatttgagtcaaccttaggtgtgtctaatgccagatctgtgttttattttccttttttaaaatttgatatttctacaaaattaattttaattcagtgtaaggtttttaaatgccacaacagtggacagagttcagatctaagttacccctgtttgttctcttgcttaattctgtgtcttccctatagcaggtgcctaataagtatttattgaaaggaagaaaaactccccccaacttgaaaacaggagcttacaaaattgaataaaggacaagaggcattagatccacagaaaggccatggctctagtgacctactgtcttttggcttctttcagttaagtgtcttgttttaaacaagaaccatggcccttgcaatgctaatgtataagttggtgtggcttaaatcttttaaaatataatagcagtacttggaacttacataatttgagtgggaaattttattcgcaaatccttgattttgatagagatgcttactccttggcttttcaccttcatgttttgattttcgttaatatgaaaccatttttcttaaagtgaaacataccacaggttgcatttaagccctgactattatgctgaatttcttgaaacaaggcttcaagctcgcccagggagcataccttacatttagcacatgtaagaccttgcatttatagatcttttaacctaagatggtcatacttggttgacctcctgaaaccctgtaggctgcacttagcttgatgaggaagacgtgcacagaaaactgaaatgatactgaatattgcttgattaggtacaactcttcctctttaagtataaaaccaatatctaaacagatctgtgaatggcggtaaggtgacggaagtgttagttccaagataaacacttcccttgtcttttccaagtacagaaattctttgtcatttcaaaaacacagataggtagcaaaggttgctgctgattaataatcattgtttacatgcctgcattttaaggatcatgggcaccataaataaaaacacaccactgagactcgctcctctctatgcacctttatccagggggcagtgataatggtgagatatttaagtctcactaccgaagcaacactgaggacagccatgaaagatagtctgtgcagtagatgtgtcccctctgaaactcccaaatagcagagcatgcagcggggaaagaattgtgggtagtaatttgggtgttaaaatattaacacatttttgcatatttaatgtggtttctgttttaagtagtaggcagattatggcatgcaagcagataagtttatgatttcaaattaaattttaagcattaaaaaaatccagaaggaactactttgtgataaatacattcagttaatcaagaattgctttcttctctgctcatatattaactaatttatagcctaatttcatgattgtaacttgtgaattaagcttcatggtgagttttaatcttaaaagttcaaaactctcattcatctagttcacatttgggtactatgggctagacatatataatctctggactcaaaatgggaaatcttggaagtcttcaccgaggaggtaaccttaatacctgggcattaagagtgtgagagccattgtttcaatctgtcactttacttggttctggtctcttgagagcagaggcagacgtttttacccttaactgccttttccttttctaacttctgcttctctctaactcagatcatagtactcgtgaaaaatttgtcctggggaaggaagcaagaccccttaacatttttctcatttctcctatttccccataggcaaagatgccttttgatgccaacaaactgtattgcagtgaagtgctggccatattgctccaggacaatgatggtgaggcgccctctcagtattgatattctgttaggataggagccaggcttgtttcagatcatgacagcaagctctcttgcctttggcatccccttgctctccctctcactccctgtgctgcttttgtactctgtcaagctgtattgattttgtttgctgatgtatcagtgttagacggctgtaaaatctgacagttaggttcattttttttcttcctctatttttttcccctttagaaaacagggaattgcttggggagctggatggaatcgatgtgcttcttcagcagttatccgtgagtaattcttatgcttcctgtctgctgtaagatacatggtctgctttgaatgggaggtggagctggaaactgtgggaaggaataagccatgtgctgcaagccatatggagcatgttggcaggtttgagggttatacggagggacatggtttgcctccttttcttagtcatttgctctttatgaccagacatcactgtgtatcagttctgaactttcttcatcttctgatatgatattgtcaactcaaaaaagatgtgcctcatgcttaagtgtgtatgttctgggccaagcataccaaattattttcatttgacccactgccaagattattcaccaaccttcctttcaatctgctgtgaaaatggagtatgttcatttaggatctgaataagctcaaggagtacaagttccactgcagtggggtgggggtcaaggggaggataggggaggatgtggtgctgaaggctggagtgagaacttggaaactgccattttctcactgtaagaaatgtaaatccagttgaaatgttattctgctggcattctgaaaatactgttaagatttcctcttacaagttttagctgtgttattctaaaaacaggactgaaaatagatcatttggataaaatcttaagagtgttgggagagtctgagatgtcagtttgcatacagcttccatcttggtgccagcagcctgagtgtcttggcctccaccccaaaaatagagctttgaaatgtgaatctgtttccagttctgggaaggtgcttagtccttttcctgtgagattattgatcttcttgtagtagactgtatgggtatgcatatacagtttaaaggcttctcttaacatgccttacatctctggcaaaaagaaaactaatgctgtaagcccttcccatgaattaaagccccagctcccctgtgagggaattcagtagccttggttgtcaggaaatgcttccttatattgagccacgattcagccctctggattgtggttgcttttagaagggaaagaaatgagatatggttgggttgggcaagtggagggctttgaggggagttggcaaagttgtttctcatcctggataatgatttcaggggtgttcacttcatttagttttatatgtcctttatggagtttttctgtatctgtgttatatttcacgataaaaagattttgttttttattgggttttggtttttaaaaaaatctgcttgcctggaactgtcaattactgatggacccagtggtcagtagagtgttttggcttttttttttgcatgtatttaatatatgtgaatcatttagtttctctaaaatggaaactgatgagaattttgtttggtgagcttctgtttcctcagtcgtagagttatgacccacaggttttaggaattgttggatggaggctcatgaaaagacattctcttatagctctgtgctttgtgctgtttttgcttgacaggtgtttaaaagacacaatcccagcacggctgaggagcaggagatgatggagaatctgtttgattccctctgctcctgtctaatgcttagttccaatcgtgagcgcttcctgaagggcgagggtcttcagctgatgaatctcatgctcaggtatgtttcgaatgccctagttctcccaccttttttgcctgacttttcactgttagcctgaattcaagagcatgtagctatgatcatttattctgttgggtttcctagactttaccctgaagagtaaagtcttcaggcatggggggatgtgtttgtataggtatgtggtctttcctaaagttagagtagatgaataaaaagtatattgtgttctgtttgtgccctactgtggtggttgctaatacgtccactccattgaaggacattggtgtttttcctctccttcccatagtgtgttagttttggggaaatctagccattacttctaaacttggactaattttctgtatatatcacatagacctatctatgccatatgtttgtatttttattgaaagcagcgtatcattcatatttttcactcctcattcagtaatgagttgtacatgtgctgtatgcctagcttaggaaatatgaaaacgtgcaagacagttctagaaacttttatttatagtactttccttgtgtgtcttattatttatacgctaattcctgaaagtggatcttatattagtttcacagttattttatagaatcctaaagttagaagcaaaaaggggagaggaagcttatgttgataactcttgagaccctgtctaggaaggggagtagagaagtgtgtgggggaaggctgaggggataaccagactgtggtatagggtcaagggacttaaaaaaaaaaatcgagcatgtttatgtggttggaagattctagtcattatgaattgtgccctacagaggagcaagttgagatttaaaaaaaaaaaaaacaagaaaaaaagaaatggagccagagtctgctgtcttaaaacttcaagtatactgaaagttctgttgaactaagatatttctttggaaaggtttttcataaatgtgatatatatttgttaaatagaatttagaatactaacatataaaactgctattaaaacattgacaaggtactatgttaagtactgggcatacacagaaatacctaagacagaatttctgtctccacaaagttaggaaaacagttctgtgagctaaacacagcctgtctttgggtgtatattttcttctagtctttttttctataatttttaacaactttttaagcctgccacacataggattttctgtattgctacatttcagacataagatgctgtttcccatgctgtgaataatcttcatgagagttttcagtaactgcatcatggcctctaagggactgtagcttacttagtattcttctgttgttggcattgaggatatttccaatgttttgccgttataacaaattctacagtgaccatttttgtgtttaaaatgatgttaggattatccaggtacagtaagtcctcacttaacatcatcagtaacattcttggaaaccataactttaagcgaaatgatgtataatgaaaccagtttttctgatcattgttataacggtgttatttgaggatctgacctcctatatcccgttttacttaaagttgccatttccaagtctatctatgatgttaagtgatgacttactgtgtatatttctaaaatatattatctttaaaaggcttctggggggctggaggcacagtagacctcttcatttgtccagtgtgtaccagaccttgcattgaccaaaagtcttcctttgaggaattgcttttaaaaacaatttttaaaaaaatgcagagaggagcatgagaaattactcagaggccttttgtgtttagctgatttttgctagctttactctcttgagtcttttgtttatctcccttacccttctaattgcttgtccttttgttgaaatgacccaccttctctcaagtaaatagcataaatagaagatacatttggcttcttggatcttctaaccttaacacaatgttctgaagggacttttccttaagcttcttaaaggtctgaattgccagtgtctttggttggttgagtgcaaatatgaagtgatatatttctgcagcatatggctaggtattgcatagcagaggggagctgaataaataaccagaaatatggattattcaaacaggaatgctgagattcagggaggctaattaaaggagagctccaaaaaacttagaaactgtacctctctagatctcctaacttcatttttgaatgctgaagttgctgttacattcattctttggcattaattagctatattagcagattcagcatttccttttttctcattcccatactctttgttctgtgttatttttcttcagactcccaaatggaaagtttaattgggatggaattttttttccatactatagtcaccctttctgatcttctagtaagagctgccaggtggctctttgtctagagagagcctattcaagactatgaagctgtaacactagaagttcaggaaagtttctgtggttccattgcccctaaatatagatctttactttgactcagtcattcatcagacagttgtgaaatgcccacatggagaggtggcagtatggagcagggtggaagaatgggcctgggacttgtaagtgtgggtttggaacatgctcttttacttactagctctggatatttggtgagttactttaacctttgtgaccttctcaccctcagtttttcatctgaaaaccggcactaataataccaaatttacaggtattttggcagaattaaactatataaagtatctaggagaattctacagttgcaaaacactgctaaggtactatgttaactttctacgttaagtgctaggtttatacagagatgaacaaaacagggttcctgcctccaagaagctcaaaggctagtgagggatgcacacattaaataactataatataatttaatatgatgacgcttcaggagaacagttacttttgcatgtatatatactcagtgaatttttttcctttctgattattgatgaagaaagatcacaaacaagatactcattgatacatactccctccttcccacacatatgtgcacacacacacaagcatatattcactaccaatttaatatttttgtctactttattgaggcataatttttatacagtaaaatgtacgcattttaagtgtacagttttgacagatgtttccaccaccacagtgaagatgtagaacagcactatccagtcgaaatgtaatgtgagataggtaattttacattttgtagtagctaccacatttaaagggttaaaagaaacaaaaataattttaataatgtattttatttaacatagtaagtcaaaaattatttcaacatgtaatcaatatgacaaaattattagtaagccatttcacattcattttttgagactaagttttcaaaatccagtgaacattttacatttacatcccaattcagatgctaaattttcatcagaatgcttgatttgtatttagatttcataaaatttagagttgaaaacatagattctcatacttaagtttgtccaaagatacttaaatgttttccaataagtccagtatcaatttttaaattttaaacttaaatttatttaaattatatttaaaatttagtttctcagttacaatagccacatttcagatgctcagtagctacacagtgtctaccatataggatgatgtatatacagattctttttatcactcccaaaggttcccttgcatgccgccaggcctggctaattttttaaaaatatttttggcagagacaggatttcaccatgttgcccaggctgatcttgaactcctgagctcaagctatccacctttcttggcctcccaaagtgctggaattacatgtgtgagccattgcacctggccaaatgcctcctttttcatttccggtttttatttatttgatcctctctctttttttcttaatctggctaaaggtttattgattttgtttatcttttgaaacctaacttttaattttgttgatcttttttatctttttttgtttgtttcatttatttctgctctgatctttattatttctcttcgtctactaattatgggtttggttggctcttacttttctaattctttaagatgtattgttaggttgtgtatttgaagtttttctacttttttgttgtaggtgcttattgctatgaactttcctcttaatactgcttttgttgtatcccataaattttggtatgttgtgtttccattttcatttgcttcagactgttttaatttctttcttaatttcttcattggcccactggttattcaagagcatattgtttaatttctgtttgaatagtttctggaattcctcttgttattgatttctagtttttttccattgtgatcagagaagatacttgacagaatttcagttttcttgtatttttaaagaattgttttgtggcctaacacatgaactattcttgagaatgacccatgtgctaaggagaagaatgtgtattctgcagcttttggatgatatggtttgtcactatctattaagtccatttagtctatactgcagatgaagtttgatgtttgttgattttctgtctggatgtttgatccagtgctgaaagtggggtgttgaagtctccagcttttattgggatctgtctctccctttagctctaataatatttgctttatctatctgggtgctccagtgttgggtgcatatatatttataattgttatattcttttgctgaatgggtccctttaccgttatgtaatgaccttctttgtctcttggtctaatttttgtcttgctatctattttgtctgatttaagtccagttcctcttgctctcttttggttttcatttgcatagaatatctttttccatccttttattttcagcctatatgtgtcttcataggtgaagtgtgtttcttgtaggcaatggattgttgagtcccatttttttaatccattcagccactctatatcttgtgactggagagtttcgtccatttatattccatattattattgataagtaaggacttaatcctgccattttgttatttgttttctggttgttttgtggtgtttccttctctttgtgaaggtgattttctcatatggtatgttttagtttcttgcattttattgtttgtgtatctgttgcatgtctcttgacattaccatgaggcttgcaaatactatttaataacccattattttaaactgatgacaggcttaacactgattgcagaaacaaactgacaagcaaagagaaaactaataaaaactctacactttaacttcacccttccactttttaactttttgttgtttctgtttatatcttattatacggtctatgtcttgaaaagttgttgtaattattttaataggttcatcttttagtctttctgctcaaggtatgtgtagtttatacgccacaattacagtgttataatattctgtgtttttctgtgtacttatggttaccagtgggttttgtaccttcaggtgatttcttattgctcattggcatccttttctttcagattgaagaactacctttagcatttcttgtaggatgggtctggtgttgatgaaatccctcagcttttgtttgtctgggaaagtctttatttctccctcatgtttggaggatattttcactagatatactattctagggtaaaatatagttccttcagcactttaaatatgtcatgccactcttcccctttaaatatgtcatgccactcttccctggcctgtaaggtttccactgagaagtctgctgccagacatattggaactccattgtatatattatttcttttctcttgctgcttttaggatcctttgtttatccttgacatttgggagtttggttattaaatgccttgaggtagtcttctttgggttaaatctgcttgatggggttttgtaaccttttgttcttgcatattgatatctttctctaagtttgggaagttctctctgattatcccttggaaaagactttctaccccaatatctctatctcctctttaaggccagtaactatttgatttgcccttttgaggctattgtctagatcttgtaggtgtgcttcgttctttcttattctttttttcttttgtctttgactgtattttcaaatagcctgtcttcaagcttactaattctttcttctcctttatcagttctgctgttaagagactctgatgcattcttcagtatgttgcatttttctgcttgattcattttaactatttcaatatccgtaaaatgtaataggattttgcgttccttctgtgttatctcaaatttcataaagcttcctcaaaacgctattttgaattttttatctgaaagctcacatatctctgtcttgctggcattgtcactggtctcttacttagttcatttgttgaggtcatgttttcttggacggtcttgatgcttatggatctttgtcggtgtctgggcattgaagagttaggtatttattgtagtctttgcagtctgggcttgtttgtattcatccttcttgggaaggctttccaggtatttagagagtcttgggtgttgtgatttaagtctttggtcacagcagctgtgtctgcattagggggcatcccaagctcagtaacactctggctcttgtagacttgtagaggtaccaccttggtggtgttgggtaaaatcgaagagaattccctggattactaggcagaaactcttgttctcttccctgacttttccccaaacacgtggagtctctctctctctctgtgctgagctgcctggtgctgggggaggggtgagacaagcaagcaccactgtggccaccactgggactgtgctgggtcattcctgaagccagcacagcacttggtttcacccaaggctcacattgaccactgcctggctgctgcctgtgttcattcatggcccaaaggctctacagtcaacaggtggcaagtccagccaggcttgtgtccttcccttcaggacagcaagttccccccagccccaggcagctctacagatgccatctgagagccagagcctggacttgggaaccttagaaatctacctgatgctttactctattgcgactgagctggcaccaattggatttgttttttttggagggcatctttttttagagaaccaactcttggttttgatataaatatgcatatgtatgtgtgtacatatatatatatatgcatatatgtgtgatataaatatgcatatgtgtatttgtatatatatggtctacaatgcttgtagcattttgtatatttgtatacctttcccccgcctttaattctttttttctacttttttgtttattctgttgccctttttccaagtttgtgagttaaacgcttaatgctttaaaaaataattctcttatttaaaaataaaaacatttcaggttaaaaaatctccttttaatattgcttagttttattctctattcccaagtgattaagtcttattttcctattacattaacagaaaatagaggctataaaatacatttctgaatttgagattttgtttgtggccttatacttgggtagtttttataaatattccgtgaacatttgaatagaatttgtgtttctagggtataaagtactataattataacataaatcaactttgtaaacatattccgttcttttctgtcctttttatcccctaatttgtttagtctctaactatggttgtggatttttttttttctgtttcttctgatccttcctatatccttagcattttttttttttttaagagacaggattccactatgttgcccaggctgaagtgcagtggctgttcacaggaggcaatcacagtgcactgcagcgttgaagtcttgggatatgatgatccttccaagtagctgagattataggcacctgctaccacacacctttactttttatgtcattttgtgttacgtgtaactcttgttaaagacacataactgtgtgtttttttttttttttttttgagacggagtctcgctctgtcgcccaggctggagtgcagtggcgggatctcggctcactgcaagctccgcctcccgggttcacgccattctcctgcctcagcctcccaagtagctgggactacaggcgcccgccactacgcccggctaattttttgtatttttagtagagacggggtttcaccgttttagccgggatggtctcgatctcctgacctcgtgatccgcacgccttggcctcccaaagtgctgggattacaggcgtgagccaccgcgcccggcccataactgtgttttttaatccagcgtgaaagtttgtctttcagtagatgaatttaactatttgattttatagtaattacgtttagcccttttcctgtttgttttatggtttccttggttgttttattgttttgtcttatctttttttcacttccattattttccttcttctttggagatttggaaaatactattctttctattagtgattacctttagttttttagaaatgtggctttatttctttgtctatgaacgtttgaaattgtttctagtcccctcaagatctggcctctgcctcatcctcctactgccatctctttcattctttcctttctgcacatttacattccactctctaaaccaaactattttagatcccttgacacattttgttattattattattttgatgactcacttttgatgtttaggcttaaacttctctaagcagccattttcttccatgtctcttcccccacgtctgtcctcacatccccacccctaagttttgaaggttgggtgctagcatcctttgctgcctctgtcagagcactttctgcaccatgcatggtaagttgtacggctgtgtcttcaattgtactgtaatacttttcagagtagagacagagtcttcttcctctgtatctccagtatctagcaaaagatacacctttggttttctgtgtttggtttcttaattttctaaattaatgagaaacattttgctgtttaggatcattggcccacggaatttttggcaaaccgtgttcatagacccaaaggaagaggagttaaaaagcctgttgccgagaactcagtctcttgcctgaacatatttagttctgttttccctgtcaaatttttcagtgcatggaaagcacaaaacggggccatagtgtgttgtaatcctgatcttgaggctcaggggaggctaggagtccactcgagtcctgggctcctgccctgtttggcctgtgcccatgctgggcttcagaacagaagctgcataagctccccaaatgagcttattctcctttgcctttcaactctcttcttccgttatcctcccaggtatttaggattatattaggttttcagttcttatcacctttcttctcaaggttctaagaagtccttcatgcagatttgtagtctctgagctttcatttccaggagctgtttgtgaagcactattacctactcgcccttacctcacagccctctctcctctagttttccctgtcacacaggtgacttttctccattcctgtgttcaaactgtctggatttcacagtgcttgacagaatcaataagaagaaaagctttcttgtttttctctctttgccaaaggacagatgaagacatcttggaaaagaagaaaagattgttgaggtgatgtttaaaagtggaactcgtgctgtgaagaaagcagcgggtagccatcctagagtacaggaaccaaaaaaaaagaaaaggaatttctcatttgctcacattagtgtcttgataaatgaaaagaaaagatgaggtaagggtggaagacgcagaacctctcaagcagtggacaactgtgtactgaaaggcggagaggaccagagtctctgatgtagaaggaaatgctcctttgtgcatcgggcagctcagcctgcttctttcagttggatagtcaacagttaggttacagtaaggatgtttggatggtctttggtgagcagcagaagaattaacatatgaacatgaatgaagtggtagttttgtagtctgtgatgtttgagagtaaaataaaattcagaaaagtcacaatttattgtgctgtttaacaaagtgatcagattcagaggttccaatccacaaaaataagacaaaattatacttacctggggtggccattttagaattagtcaggaaatgaggatggaactgtaacagtgccctcattgtccctggagggagactggtttgccacttccgtttctttgttacagatacctctctttggtaagatggttgctacaaatagaagattccaatatatcaggtttaattatagcctgcactctaaatcatttgcttcttgccaccacaaagcactttttaacagtatgtccttgtatcagaatacttcaatgttctgtaaggagcaacagagccagtgggagacaaaagaattatattgtcagtttccttgaaaatgttgacatgaagcttattacttctgctgtaaaaccctgttccagttagaaagagaagagaccactgtgatcccaggggatgtgtacaaatgcagctttgggttatgtagcataaatacagtgaacccatcttggttattaactgtaaaggcaaaaagagaaataggaggatacacagccacatctgttccaggaaccaccagtttttgttgttgttgttgttctaaggttttcaataagattttccttaccctaaagaaaaatgtctctgataaagaaaacaaataaaatggcaatggtataatatgtgcagagtaagttttcgcaggcccaattctggactgtgagcttgtggcaaagcatatagataggccagcctggggaactttggatttttattcccttgttcttttccttactctactttgcttttgttcctaatgaacatcggaaggtccaaacaatatggcattttattcttgtcatcctttacattttttaagaactagagtcttttcttctaacctccagtctcccaggattcaagtgcaaaagcaaaattataatggaaatcttttagaagtcagctgtgcttcttgatggggccgtatacaggttgtgttccaagctgcacatgcagatcttgcttgtttgtctaacaaggagcattctctttcctcttcaagtttaatattaccattctcccttagatggatagtggtagtttgcacctgttctctaggaaccagaaaaatactccaaaacacaaagtaatccttccaacagtcctccaggctggcgttaccttttaataaatgggaaagtgctgtggcaaagaaggtagataaactgaatcaagattaccgggcaggaagtggtgtaaggcctgtctgagccctgccatcagacctcatagctattcatcattccagtgtagtttaaatcgcacatatttaaagtatacaatttggcgaattttgcaatatgtatagacccatcatacccccactgcaagcatgacagtgaacatatttgtcacacccaaatgtttctttgtgcccctttgtaattctctccccctacctcagtgtcttcaggcaaccattgatttgccttctgtccattatgtattagtttgcattttctagaattttatgtaaatggagtcatacagtgtgttcctttttttggtctgacctatttcactcactgtaattattttgagattcgtccatgttgtgtatcaataattagttcctttttcactgctgagtagcactccattatatggatatattgcagtttgtttattcacttgttgaaggatatttgggttttcagttttttgctcttatgaataattctgcagtgagctttcatgtgcaaatctttgggcagacattgtaaattgctcttaggtaaatacttagttaaattgctgggtcatatgttaggtatacagttaactttttaaggcactgccatactgtttacaaaatggttatagcattttaaaattccacagcagtgtgtgagagttccagttgctgcacatggagcagtatagtcagtcttttttgtcttagccatagttttaatttgcttttccctcatgactaatgatgtcaggtgtccttcatgtccaaatttgccatccatatatcttttttggtgatatctcttcaaatcttttgtccattttgggggtaaggggttatttgtcttattgaattttaatagttctttatatattatatggtttatatcagaggttaccccctcagccccagaatgcacagcagaaggtgagcggcaggtgagtgagcattactgcctgagctctgcctcctataaggtcagcagtggcattagattctcataggagtgcagatcccattgtgaactgcgcgtgcgagcgatctaagttgtgcaccccttatgagaatctaatgccttatgatctgagatggaacagtttcatcctgaaatcatcccctgccccgtggaaaaactatcttccactaaactggtccctggtgccaaaacggttggggaacactgatttatatcatgtaagacctacacatcttacagatattttctcccagttcatgtcttgcttttcataacactcttttgaaaatttttcagttttgatggagtataattttttatttgttccagtagtctttttctgttggtgtcattgaagatatttattcattttgtctgttgtcaaacttactggcaaaaagatgttcataaatattctcttattatccttttaaaatcagtagaatctgtatttgatgtgctcttatttttgatgttagtaatctgtgcctatttttctctgatcagtgtggctagaggcttatcagttttattgatctcaaaatatcagtttttgttttcattgtttttctgtttccgatttcagtgatttctgctctggtcagtattttttttccctctctttctctctgtgtgtttgtgcgtgtatttgtgtgtgtgtgtttgagatcagttctcgctacattgcccaggctgacctctaactcccggactcaaaagatcctcctgcctcagcctcctaagtagctgggactgtaggaatgcaccatgatgctgggcttttaatcttcattatttattttctttacattactcagtgtttaatttgctattctttttcctacaaactgctccaaaatctgaaactttttgaacatcaacatgatcttcaaaggaaatgctcgttggagcattttgaattttagattttctgattagggatgctcaaccagtataatgcaaatattgcaaaactggaaaaaaaatcaaaatttggaacactacttgttccaagcatttcgaagggatactcaaaggatacccctaagggatacccctaagggatactcaacctgtaggtgtttactgctataaatttccctctaattgctactttagctgtgtcatatagattttgatatgctgtatttttatctttattcaattcaaaatattaatttcttttctgattcatctttgaccaatgagttatttagaagtatgttgtttagtttccaagtatttgggaattttctgagtatctttctgttactgatttctactttcataccattcattgtggtcagagaacatactttgatttcagcctttcaaaatttattaagacttgtttttggcccagaatacattcttatgttgctaaatattgtatacttgaatatgtatttgctgttgttgggtggaatgctttataaatgtcaaataggttaagttgctgatcatgttgttcaaatcgtctatatttgtacagatttcctgtcttattctatcgattattgagagaagaatattgaaacctctgactgtaattcgggatatgtctatttttcctttcagttctatcagcttttgcttcatatattttgagttcttttagctgcttaaacttatagaattatatgttcttttgtttaatcgacccttttattattatgaaaataactttctttatccctggtaatgttctttgatctgaaatctactttgttttatattaatatagccactacaactttctcttaattagtgctaacgcatggtatcttttaccttctgttatgaactaaactgtgaccctctccccaccaaaattcatttgttgaatttggagatagggcctttaagaaggtaattaaggttaaatgaggccgtaagagtgggaccctaatccaaaaagaggcaccagaagtgcatgcacacacctgtggggtaaaaccttataggagtgaacttctatttctctctccaggtttttatgcttctattgtcatacatttttatttcaaaatgttattagccctgttatacattgttgtttttgtttaagtggtcaagtggtcagttatcttttttttctttttctttgagacagagtctcactctgttgcccaggctggagtgcagtggcgtgatctcagcgcactgcaacctctgccttcagggttcaagcaattctcctgcctcagcctcccgagtagctgggactacaggcatgtgccaccacgcccagctaatttttgtatttttagtagagacggggtttcaccatgttggccaggctggtcttgaactcctgaccttgtgatccacctgccttggcctcccaaactgctgggattataggcatgagccaccgcacccggccaagtggtcagttatctttttaaaagagatttttgaaaataaagagaaaaagtcttttatattcacccacttatttgccattttccttgctcttcattcctttgtgtagatccagatttccatccggggtcagtttccttctgcctaaatgacttcctttaacatctctggtaatgctggtctactggtgatgacttctgtgagctgtatatgactaaaaaaatatttgccttcatctttttcttttcttttcttttgagacacagtcttgctctgtcacccaggctggagtgcagtggcacaatctcagctcactgcaacctccacctcctgggttcaagcgattcctgggcctcagcctcctgagtagctgggattacaggcatgcaccaccacccctggctatttgtttttgctttttgtttgtgtttttttgagatagtctcgctctgtcactcaagctggagtgcagtggtgcgatcttggctcactacaacctcttcctcccaggttcaagcgattcttctacctcaacttcttgagtagctgggattacaggtacccaccacgacacctggctaattttttttttttttctactttaagtagagacggggtctcaccatgttggccagggcggtcttgaactcctggcctcaagtgatcttcctgcctcagtctcccaaagtgctgggattacaggcgtgagccaccgtgcctgactgccttcatctttgaaatatattttcaccaggtatagctttctaagttgatagggtttttctgggagtttttttgtttttttcctttcggtactcttagttgctccactggcatctggctttcttggtttttgatgagaagtctcccatcattcatatatgtgttactctatttgtaatttgtcccttttttctggctgtctttaggatattctctttttcattggttttgagtttatgtagtttttttcacgtctctggtgtttgaggttcgttgagctacttgggtctctgggtttatagttttcatcacaggtggaaatttttcagttataatttttttttttttttttgagacaaggtccctctctgttgcccaggctggcatgcagtgatgcagtctcagctcactgaagcctctgcctcctcctctacctcttgggtgcaaatgatcctcccacctcagccttccaagtagctgggactacacaggcatgcaccactgtgcccagctaatttaaaaaaaatatttttagtagaaatacagttttgccatgttgcccagttggacagttatagttttcaaacatttttcctgcccccatccacctttaagggagtataatggtatgtatatgatataattataaattgtgtattataaaatatgattccatgtatattaggctatttgaaattttccaaccacagttcactgatgatgtgttcattttttcctgtattctttttcctttgtgttttattttggacagtttctgtcattatgtcctcaagctcagtctttcgtttcttctgcagtgttaatctcatctactgtatttttcctctgtagctgctcagtttggtcttttcttctatgtttttagttaacatgctgatgcttttctcgactttcttcattttacgtatcaattgtagttataattatgcttttactgtctttgtcttctaattctgtcacctgtgttatttttactgatgattttttttctcctctctgtgggtcacatgttccttctttgaatccctagtaattttttatggaaattcaaatattgtgaattttaccttgttagatgttgaatttttttttttttttttggaagggtatttctgtaaatgttctggagctttgttctaagatacaaagttacttggaaatagtttggtccttttgagacttacttttaagctctgttaggcaggaccagattagtctatggctaataatgcctcgctactgaagcactactcatcttactactccgccaggtgcactgtgaattaataagacttttctactgtaactggtgggaatacaaactattcctggccctccgtgagctctgggattgtcttttcttacttctcttaggcagcttctctctgcagtagtgattagtttcctcacatgcttgcgcttgtcagttctggagactggaaggggccctctgcagatctccgtgcagctctctgctgtgaactctagctgcattgctctgccggactcctagctctgtctcctcccttctctgaggcctggaaactttccaggcagtcagttgggctcattgcatgtgttaccctcctgatgtcaagtgtctaaaaaccattgttttgttcatctttttttttttttttttaactttcagggttagggagggtgtaaatccagtccttgttaccccattttggcccagagtggaagtccagcagtatatgacactttttaagctacattttcttattctttattcctggtgggtagtaatgcaattaacttgtatattgatcttatatttagcaactttgctctatcacatatcaggcctcagtcataacatggttatttgttggaataagaagcccaaaatttcaaggactttcaatgacaggtgtttatttttcactcatggttcattcatcactggccgtcagaagctcagctctacaccttctttatttcaggactcaggctgaaggagcagtgcttcatggtacatgcctgtctcatggtagagggaagagaccgcataatgcaataaatcttaaaacttctcctctgaagtgcacatgttacttacattcacggtttattggctgtgcacagtcacatggccaagtgtgaagtctgtggcgggcggtgggggtgatatgggtagtgatgtgttggagccggctcatgtaggttcatgagagctgatggtgcacatctcttcctatcactgcatttagtgataccatattagtaacttgaaattgcctgtggtcgtatttattatttatttattttttgtttctgtttttctttttccacccaccccaccctctggctgtggtcctattgatcttactgtctaattcatagaaatcctgaatcctgtaaagtgatcttgtatttcagactctaatgtaagtgaacttcatcatgcacgttgtaaagcaaagaaaatatgatctcatgtggcattatctgtatttcttgccacgattagtttatggttcacagaatattttaaagaacaccttgttgcttttttttttttttttttaatcagtctcccttgtccaggaaaggagagggttttacctctttcatttgtccttcaaataagtttccttcaaggtcctagtcttctgttctgaatactttctgtaccctcccagggtaatcttactcacaccatggattaattactgcacatagatttgatgactctttcaaaattttccctattggtgacttcattattgggcttcagacataaaagttcaagctggacatcacgccgtgttccacaggcatctcaggttcaatcagaactcaacccttcgcacccccgcctttcttaccagtctttctgcctctgatattgtttctctcttccttctgctcccccatccctgttactgtccaacacactgtggcaagcataatctttcttatacacaaaagtcagcctgtcttctgttttgctgctgcccctcttcttactctttatattctagcagtaccatgctccacttccctaaatgtcccatgcttaacgcctgtctttgcatgtgctcttgtttccttctgcatgaaataccctctccctctttgcgtatccaagaaaaacatcccctgcagcttggttcaggcatcatctcctttttaagtcctccctgactcagacatggtcagccctccttcctgcgttcactctgctttgtatatacctccaccgtaggacttagcttttctcagtctgcccattctctgcatgtctgtctcccctgtggaccagactccttggaagcaatgagctgtgccttgtctctgcatcctggacttaatatctggcacctgctaggtacctcataaatatttgatgagggaacaaatgaacaaagaaaatcatactcagaatctgtgtttatagcaaaagtgtttttgcataataaagaagaataagctaattaaaactacaacagaaaacgttttctcccacatcagaaggctcactgttagcagaatagggagcagtggatgactctccaccatttcccacaaccccccagttttatagaggctagcattcacattggttctggcgtgatcgacagcctgatgaacccagacaagactaagataaactacttgtcctccagtagaataaatatttcaaataaagtcaacccaagaaaggcaggccaaacagctattgatttctaaaagcctgaactcaagcccagtgaatattccaaagttcacctccatgctgcttgcctaagtggtgatcaatatgcaattactgccccctctaaacatgtcttacactgcctacctcaagaaggattttacttttaaaatcttttgtttgttgaatttgcttaggcaggaaaaaaaaagagaggcttggctacaccagagtcttttgaattgtatttcaaacagttctgtgttatttgtgaaatggtttgagcgtatgctgaatggtaactgaaggtgccctattttatgaccgccattcatttcaagaggccttttcctgagtgactaaacaatacagatattatatctcaatgtcctaaattttgctcacatggttatctgtcctagtcatgacttttataaattcaagcttgtaagatgctgaagtccagctgcagtgaaaacaagtctctgttagaattttcatcttaatacaaaaaatcccttcgtactgaatttggagccttgtttacctggctcctcatatttaagatttcatgcttctctcaaataggcctttttcataccattgctgtagtcagaacctttggtcatttctcatttttgttgttgccagagtctcctaactgtcctcccttacccccaagcggtgtcattcccgtcccttcttcacattgctgccagattaagccttctaaaatgtatctgtccagggccctcccttgtttgaaattctcatgccttctcgacatctacaggatggagcctgggttccctgacagcacgtgtggagcctgtcatgaccgtgttcctcgccgcctctcctcagtcatcttccaccactggccattcggaactacctctagttccctggctggcacgctcctacaggctgcacacacctttgcacatgctgtacagccaccactcccaacagtgtccttgctcttcgttctctgcctggcaaatactcattccttagactcggtgcagaagtcacctgccatttgacaccttcactgacttctcccaaggcaaattatctcctcttctcatcatcttggacttaatttccattgcttcagacttttgaaagcatttttatttacctcttcttacattgcttaaagacaaggaccttataactcctagcagctagcataatgtctgctgcataaagacatatgctcaatagtatatgcctttttttctttgaaactcagtagttggattgatgggcatttgtgaatctttgtattgtttgattgatccacaagggaaataaagataggaataggttagcatgaagtaggatggccaacgctctctctttgcccaggattgagaagtctgggatgtgttactttcagtggaacagtcctaagtaaaccaggatggcctgtagctccaaggggcactatcagcaagctttgtacctactcacctttcctccactattgggacccagtcctggctggctagtctgacccaggatagcactctttgtgaccagtagcactttaatagtgcagggttttaatagtgttgtgtctgcaaaagactgtccaaaggggatattatttctgattccttttctttggctttcacatgagaaattggatgaaaggctctgggttgttaccctgtttttgatgaatactgccttctcttgcaagaccagtcacctctctccagctgtttatttctcccttgtttatctttggtctccacatcaccattagcttttcttaaaagtagtagtttaaatcttgacccggcttccctctcttggggttcctcctccaggctttactaaggcgtaacctacactcacccttcttactttctcacctccttttacttttcactccacttctgccctaccactgctctctggaaggttgctagtggcttcctgatggtgaaatctggtggccgtttattttgcttttttgacagactggaatctcttcagaaactgtctccttcctctaactaaagtattccctgcttgtgtgcccactgtacttattattttgttacctagttttttgttcatttattttaaatatttacatgtatattattctttccccacactctcccaaatacatgtaatttgtctctctcactttaatgtaacacatggcaatctcagaaccaacatgttgaattgcatccactttactcctggaatcacttcttcacttggatgccttgtggcctttgatacagcccatgtttccctccctgatcgaagctaggaacactctgctccttggcgtacctcaaacacaccagtcgcctgtctacagttcatttctatttcaggacctctgtgcttgctgttcctcctgtcttgaatgttgttttgcccctaaaatttacatgactgattcatcttatcactcagttctcaacacaatgttactccttaggaggctttccttaataactgaatctaagagatccacgccagtcattccttcacatgtcctcgttttacttccttgacactaaccattatcaggtatctcaatttctctttgtctcctgccttgagaatgtaaattgcttgagaactgggacgcaatctttcccaatcatgtgagagttatccagtaaatatttgtagattgaataatacatggggaaaattatatgctgatttatacttttctctgatcctttcatattactttggtctccccagatttagcttttttttttggaagcagaacccatttcttactgttttctcttgtgtctaccacagtgctaagtagttgcccagtaaatattgcatattggtttggttggtttatttaccagctgtagcaagataggaaatgactgacttgcttctctctacttcagagtatttaaaagaataatttaagattgtagaaaaattatgctccctagggaagtatctgcaagaatagcagccagtggcactattattctatgaccttttgcttcaagagggaaaaacacctttattttttttcttgaaaatagtttatgttttttaattctatgttcattatggaaaaatgagaaactgagatatagaaaaaggaaaaataagatgcagaaaaagcatctgacacagcccaacattctttcataccaatagttcaactaggaatagaagagaacttcttcaaccattgataaagagcttctacaaaaaacccataactaatgtcatacttcatggtgaaagagtggatgtttcccccctaagacaaggactaggattttcactctcatcactgctattgggcattgtcctagaggttctagccagggcgattaggcaataaaatgaaataagaagcatctatattagaaaggaagaagtaaaactatctgtttgcagataacatagtttatatagaaaatcctaaggaatctactaaaagattattagaactagcaaacgagtttagcaaggttgcaggaaataaaaccaattgtatttctatacgcttggagtgagcaatccaaaaatgaaactaaggaaacaatgttgatagcagcattattcataatagccaaagggtggaaacaaaccaaatgtccttcaactgataaatggaccaattgtggcatgtgttattcagcaataaaaaggaatgaagtactgatatgtgctacaacatggatgaaccttgaaaacattgccaagtgaaagaagccagtcataagagaacacataatatatggtatctacttacatgaaatgtctagaataggcaaatctataagaaagaacatagatcagtggttgcttagggccaggatgggatgaagagggtagggggtgttaagagtatgtagtttcttctcagggcaatgaaaatgttttataattgactgtggtggtagctgacatatctgtgaatattctaaaacccattgagttgtacattttaactggtagaaattgtatagtatgcgaattgtctcaataaagctgttaaaaagaaagaaaaatgaataatgaaatgtctataatctcaacaccccgaaataatctcttataattttagtctctttctttccagtcacttttaatgtacatttttcatgtgtaattgtggtaatgcttcataaagaattttgagtattgccttttgtgtttatcattctgactgtaagaatttgtccaccctattgtagacgtcttctcctaattgttaacaagtatgtaatatttccatttagatgtataatgtgtacggcagcaaatacccttttttttttttaagctctataatttccccatgaaataccttatctgaaacctcttttgttcacagggaaaagaagatctcccggagcagtgccctgaaagtgctggaccatgccatgattggccccgaaggcacagacaactgccataagtttgttgacattcttggcttacgaaccatctttcccctctttatgaaatctcccaggaagatcaagaaagtgggaaccactgagaaggaacatgaaggtagggttcactggaggagtcagcctaatttaggtgcattaggagaaatagggaaatgtgaactactttgaaaaattctgacgtgtttgggggatagaggggaagagtgctacctttttcttactattttcttatttttcatgaatgaaaaagagaccccaggtcactgatagcctttgttgcaccagttctctgcttgtttgaatcctggtcattccatttccttctggactgttaataagtctgtgtgtgagggttttgttttcttcactataatttgtagcgaggtgtctctctgatggaagacccttttgaaaagagtaatgaggtggcaacacatgtcacctccagagtggtgctttcatgtatttctgtactaaagtatgattcagccaacatcaggaattgccgaaataaactatttatagcccagattccccttttatgtttctcctccctgatggtgcacgctcccagcaaaatgctgccatgaattgtgacgctgtaaccagagtagttactgctaggccagtctcttcctgctgttgtctagtggcctgctgcagccctctccccagtaaatagccacagtgcaatctggaaggccagggatttatgagcattgacagttctgctggaggctggcagacacttgcaccagggaatttacatggttggatggttattttaaagtgtggggagcgggtggagaggagtggggaggtagtgtgttgagagaggagcagaagctgagctgactggctcatttggctgttttctcagaagcaatgttcgtcccatggtttaggaggcttttttttttgtcagtgcttggtggaattggcatgggtatctgcaggatcttttgcattcctcatcctcatagacgaaagtttgagaactcccgcctctctcttttccagttgacttggcttagtctctcccaacttggagtggctaaagggaaggtggtgtgacctaccttcagtggttatcttcagtgatatcttctctatcaaatcaactctccagagacaacaggaaatctggctggagcaaaagaggaactggccttgcaaatactgtggcctagagacctgagaacaagtagagacttcagtttaactcattttgaccaaacactagctataaatatgttaaccccgtgctagattttccccactgaaaattcagcaaaatgagtccctgggagagggaatggagggggtcctggaggtctaggagataaacttttcagacagtcaacatttagtgaaagcctgccactttcctggcccggctgcactattcgctatcatatttaaaactcacaacctatgaagtattggtggcatccttatttttttttttagaggagatgaactgggaaggcagccgagctgtgggttctacagctaactaggtgtgcgactttggaaccttggcttaacttcccttcactgcattttcctttctggtctgtaagatgagggaagtggactagtgaactagaagctctgatagccacaccttcagattctcaggaacaagccctggttgtcagggttgcctgtgagccaggaagctcctcagggtggatgctgtggctgacctgctgggttccactgagagacctgaggctgcatcttgagtgtgctggaacagagtgtgaaggaaaacagcccttagcaggctcctgctctgcggtcatggcactgagaagaggaggaagtgacagattcagtgagcagctgcttttcttctgaaaaatgtgcccggtggcgtgctggtaacagtccatttgctttagagtaaccgcattaggcatgtgataacattatgttagtgagggcaatggcttggtaagacgtctcctagaaggcatgttcaggctgtaatggctggggaggatgagctctgcatcctgagcggaccagtacccagagagcagaagtgaactccaaggagaaagcacagccctccactcctgccacccctgccagctgctgccactcctacaaaccggccttcggccatgaatggcagagtgagaatggaggcagagcagagcagtgcgcactgtgcagggtttctttgtcctgtcctctgggtaagactgtgctctttgttggcctccgagtgccagcccttctcacgtaagtgggccagatttgtgtgctaagctagagcacagtggcctcagaccatcaggaatactggtgggcatgcccagctcattcctgcccccgggcttccagcatgctcttccctccatgtgcagtgatttttctccaccctgtctgcctggctatcttttagttgtccttagtccttagttttgttttttgtttttttttttccttttttttttttttccctggcctgttgcccaggctagagtgcagtgatgcgatctcggctcactgcagcctctgcctcccaggttcaaccgattctcctgcctcagcctcatgagtagctgggactacaggcgcccaccaccacacccagctactttttgtatttttagtagagatggggtttcaccatgttggccaggctggtctcgaactcctgacctcaagtgatccgcccaccttggcctcccaaaatgctgagattatagacaggaaccactgtgtccggcctggtccttagttttgatgtctctttctcagggaagcatgtcatgaacccgtagactaggatagaatcttctgttcagtggactcttggtctcaggactctgccttcatagcccttgaaattatggaaccaatggccttgtcccctctagatcccattgcctggtcccgtggtgcttggcatgtgatagatgcacagtaaatgtttcttgactgtgtgaatgaacaaccatttccctgaaaggctcattgaggacaaacatgggtttggggctttcctcagaaacctacaaggttgaagtcaatacagttgatttcagttcagattgatggttgtcagtcagtcatacacctagagtgaagggtctttcatccagcttgtttggatgctaaaatgagtgggttgctagccctaagttttaactctgtcacattggcttggagattatggcagaacccccactttagagccacacccttaagagctttgctgtacactgaccttccctataggcaaggccaccctgtgacaagcacctaggggtagcccagctcctaggtggaacactgaggcctgggaatcagctcgccagtccagaagctctagagagctaccccacactcttccctttctttcttgtgaagcttcagcgcttgtcactgttgtccacaagagcaccaggatggctaactagtagaaaggagaggtttgttgatgatacaagtttgtaaactagaaagagacagtctgtggcgtgtactaaaggtgatctgtcttcaaaaaacgaaagggcaggttgggttttaggcctcacaaggtctgtattagacaaaagagtcatacacattcagcaggttttgggggaaagctacacatatttatgaggggagtcaagtgcatgcgcaatgggtaaacatatgtaacacattccatgttcactctggggcagggttttagcattaaaatgaggtaggatttggctctttatatcaaaaggtgaactgtaagacacaaagtttgtgtatagtctctctgagcttgttgaaactgtctggaagtctgcagttgcttatcagaaaataatgtttgcaaggccaatcatctgtccaatcagagttaggaggggtctgataatttgcctgatattgttagggagtttcacaagagtgtgtttttttcttgtagccatgggaattcagggagttgctatgccagctgagccctgaaccctccacctgtaggtgacatttatttccttaaccttagggtccatcttatttgataaaggggcatctattttggtccctcagatgatatcacacatcctggtttgcctctttaagtccatcctggtcccgtcatagcccctgtcacctcttagggccttcccctgactcccaaagtcgcagtgcagcctgaggtggtacagatggatctgctgcttatcagttgtgccattttgggcaagttcctaagctccctgggccgcacttgtcctatctgtaaaataatgaggctagaatctaccatgaagggtgtttgcaagagtcagatgagatgacatgtagatgcttagcatagaccccagaataaagcaggcaccataagagaccttaaactgtctccacctctgcccaccctggctttagtcacacatacccatggggatggccaggcagagaaaatgcccacacctctactgtgggagggccaggagagggtaggttggttttactggcctgtggtctaattgctccatgataactgtgggcaaatgggcaaatccattcttgatgggaatgtcaggagtcaagctatgctaagtagtgagtgacataaaaacagctgtgttcccaagtcaacagaagggcttgagagatgggagtttctagattaaggtgactctaaagaggggagtaaaagcaaaactgcccttacaacctagaatgctggtaatttagttcctcttttgtgacttggggtggggaaggaaaagaattattataattgaaatccatttaggtttgcataataaaaccttcagaaatagatcaggggaggcactaagcttgtgggatgggttggaaagaaatgatttgcccttgggtgcactagcatgattggctgcctccttggttttaaaagaatagcacagtatatattgtctccttggtattaactgcttcagaataggagggaagaagaaaagaggtgggatccagaaatggcatccgacctttacttcttgtctcttttaaaaattctcattaatataggtccagttttcctcgtattgcttcattaggtatgtgagttattgagtttgtagcagttctagttaattgcgctgttttaacacagttcccctggaggctgttaagagctttaagagggtgagccaccgagcagcatgtaggtgtgtggtgtgcacactaggtatatacacgcatttttaccttttcagcagtgacagcagttggtaataggtcagtgctttaaagaatacttttctgtcatcagcaaagaattgtaagtgattccagtggactccacatatcaggaagcatacggctgccttgtgtatcttcctaacagtgaggaaatcgggtcagagctcccacgccgcctcctaggattagaagaaggaaatggcagaacctttcctgcagtcagaaaagaagggagcttagccaacacagacaaaaagaaacatttttaaaagtcttcgtgctgggctgtaatgacatggcattgtttgaggccagcttttactggggctcctgctatgttcaaaatataacaaagacctagtatgtgacagatccagtggagacaaggaacagaatacaatgcttgtcctgggggagactgctcttcctagtattccatctccagatacttttcctctgcctggccctcaggcattcgtttttgaatagattggcagtgtcttcccctagttccccttttttccttccatgcattctccttgggtgatctcatctactcctgcagctttaaccttcatctatctgtggttgactcccagatcttcagtctagttctcactccctacctctggttgacacagctaataatcagcagacagcaccagatattcaaactcagcttgttcaaaaccatatccattccttcactgctgtcatcttttctgcttggtaaatggcaccagcctcctccccaccacccactgtggaaatcaacatgccatgcttaactctaatattccccacgtgtaattgatcatcagccctatgaattcaccttagaaaatctcttgaaccagtccttttcattgccactgtctctgccctcatcatctctcctgaacttcactgcaaccttaataagtctctgctttagtctcccaattctcatgtcctctcaaagttaccaccaaggtaggagagactcccagccctcagcaaatttacagtttgaagaagtaggaaaatagacatgggggaaaaagcaattttatagatatttaccacaaaactatattacaattacaaagacatactagacaagaatatttcattgttaaagggaacacaagaacagaaatgcttacagaggaagacacttctggtgggagggagattatggtacagactgaaacaaaaggcattagaatttcagccaatatgttcatttgttactccctatattcagcatctgtaggagagtctttacacatccaatcatgtttgagccttacaacagcccctcaagcttggtgttatttctcattctgaagatggggtcattgtgaggctcattgaaatcatggctttaggtcatacagtgggtaattggctaaactgagagtcagacccttcctcagctcctgatcacacgtgtcacactcatttcacaaagtcattgccattgttatttgttgtcctgggtccagactagcctgctcttctctgaattgctgatagtcaagagttcttgatcagaagaccttggtgctttgacaggtcatcatagtggtagggactcttaccatttcaaattatagaagttattagggacagatggcaaaacaacttgatgaaattgttgtttggcatttgtactgcctatcatagtgcttggtgcatggtaggtgctcagtaaatattgagtgaatgaataaatgaatttatttaacatctttatatcatgtactggctataatcaacatgagacacatgctggtcattaagagcattatgaaagagtgttgttaatgagttaaccaatttatggttgtaccataaggctgctcagcatctgtcctgtagtagttttcaatacatggttttttttttatctttaagatcaaaattaatacttaccttcttgggtaagaattaattgaagtaactcatgcaaatctaacacagtgtcgggggtatcttagtccattttgtgttgctataacagaatacctgagactacataatgtataaagaaaagtagttcatttggctcacaattctggaggctgagaagtccaagatcaggcagcccatctggtgagggactcatgctgtgtcaactcacggtggaaggcaaaaagggaagagatcgtgtgcagagagaaaacacaagagacagccttgctttataacaaccttctcgcagtaactaatctagtccagcaagagcaagacttgcttcattcccaccagactacattaatccctttgtgagggtggatctcgcatagcccaggtgccttgtaaaggtctcaccacctctcaacaccataacattgtcagttaaatttcaacatgagttttggtggggataaaccacatctagaccataataggtgggttgataaatgttggtttagatcattttaatactgactccagacttcacactataataaatgttcattagtggttgaagaagcccagagaaaggagtatccttagggattctgggaaggcttaagagatgagataacatttgagtactcttcgaaggatacatagtatttaattattatgccagtgaaggaaatggcagaggggacagtgggcactaggcatgtatagctagttattgtgatatggatgatgaagaacatgagttttggattaagacaggacttaggttggtctcctggttctgtcatttaccagctttgtgactttggaaaagttgcttagcctttttgagcctgtaatttcttctgttgtaaaattgagatactcttagaatctatctcataagggtaacaagtgaagattaaatgaaataatacagaaatcaagtgcttagcacagaccctgtttcattagtattagtggctggaatgaggatgagtttccagtttgtattcctcctccttctatgttggtaattttagaggtacttgccagaagaacttcttttccttcctgaatctaccagtcctagaggcgggctgtaaatatgccagttctatgtggaatacaagataaaaaccttccccgagaggatataccaaggaacctcaggtccctatttctcctctgtctaagctataaacagaggattcagaggctgttgccaccacccctgtgcccatatttgtattctccaagcttgacaatcacagagttggttatagtggtcagaacaataagccagtaaagagtgaacagtatttaagaatggcattaagccatgtactagcagcagtttatgttaaataaggatgaaaatgtcttgctgttgttttttgttgctatttgaaaatcttataattgaatagtttctggatcaattccttttctttccctccagctgcttgtctcattcctgacctcggatgacaaaatgtagggatgctgaaataaacaatgtgcttggatatggggttcctttcatcaggcttgaggggatgattttgagtggtgcacatctggtttgttaactggttcaagtcatattaaggatttacccagctcccaagtagatcacagcatagctgtttgccattgaagaagacagtgagacaggatgaatttgccattctggaagcaactgttctctttcgagggagtggggaaaactgatgaatggtcacctcacatttatcgggcatctgtctactaagcctcagggctttacaggtgcacataaagtacctttatgaattaggcatttctgtcgtcttttcacaggtgagtttcagagagtttgtcagttaccaaaataccgtttagcacattagtgacaaagcaaaatttgagcctaagtctacttctaaagcttcttccaacaccagggtggctccagtggtcttctggttggtaatccagaggcagcacagagtcatagaaggcagattgcttttgtaggcagataggcctgatttcaaacccagcagtatctgcaagctagctagtggccttgggcaagttatttcttctctctggaccttgaattcctcctcagtcaaataagcctgataaaacctttcttagaatgttttgtgacaaataatgatcatgagtgtctgacgtagtctctagcaggtagcattcaatatggtaatatagttattgcacatttgccttctttcaaaaaagaatgggtccctacctcttccagttttcatgtttacatataggatataaacctcttgccttttgtggttgtgaagcccagctgtgacccaggactttatatgtggataggctgggtcataacaggagcttcctgggaaatgggacagccactgtttttcatgatggcatattaccctggaccctcagttacgatcctggttatactagcacttttcaaattcattacgtcttcaaataggtaccagactcttctgtttcagtttgaagctcccattctagactgcccttgcagagggtctatttctatgggtagatgtcccaaaggtaggtcagtgaggcttcattcattcttatattaaacaaaccaccagtccctgctttgtgtcaggcttggtgctgtagctggaagctgaacaggttcacacagcccagccagggagacatagaaacctgcatttctattatgaggtaaaaatgtaaggtgaatgaactgacagctcagctagggagacagacacagaaacctgcatttatgttacaaggtaaagatgtagaaggaagtatgaggcgctgtgggagcacaggaggggctccctgtccaacctgggtagtgagagaactggtgattagaaacagccccccccaggaatgtggcccccaagccaaacctttggtaaaagttagccaggtaaaggaaagtcaatggaaaaagcagcatgtattaaaaaaaaaaagttgggagggacaaactgcagtgagccttaaacctagctgaccatcagaatcatctggaatctcattgaaaatgttggggacgtgttctcagagtttctgattccagcagtctgcataaagtcaatggatctgtatttttaccaagttccacaggagtgtcctctgagaccagtctggtaccagtccttgctgaggagagtatggagattagatagttaagcagaagccagacctggaaggacctgtagagctgttgcaaggattgacttagttaatctctggacagtgttgaggacggtactggtgccctggtacctagtaagtattcattaggtgttagtagccattgctgttaggctagttgttttaactatgctctgctgccagaggactcttccaaagttttacaggtcataggtatagtactaatttcagttattttgatagtttccgctaattagcccaaattcagttttgatattgagggcttggttggggaggatgaaggagaaacacttatcactcctgtttttcttttgtgtttttcattttgccaggtagaaacttggctctttaggggcagcattaccagaattcttattttagaaatagaattttccattgatgctctgttattgtgtcagtaggactctgttagttttcatttataatcttgattaagttgtatagaaatagtttagggtgtagtatatctcttttatagataaaacaaatgccagcaatgtagaaacaaaagtagagaaatagccagactcctttagttatttctccagcatttgtaggtggtgccaaaatggggaaataacttaggaactaggcaataattaactgtgggatctggtttattaaaattgaacacttaatctttactgagatatgcttcctaatgttgccatttgggggccttttttgttctttgtccgctaataggcttttaaatatattagctcatttcacctaatcctcacaataaccctgtgagctgtgtattattacccatagtttatagatgagaacactgaggcccagataacttgtcattttctgaaggtcacacagctagtacctggccttcctaggaactgaacctaggattttcctgcagcttccaaaaactgaatcacaagcagtgcacttctgcttttggtttgttttggtttttttagatcataaattaaggttgctaacctgtagtgggactaatttaaactgtttggtgtcttttctcttcagtcccttaaggtgtcagtagtcctggccccagtactgcataaataactttcatctctcaatcccaaacatttctccctggctcactttgtgtgcctcttgttggccttcagacctatctatctacccactgtatccactcttctcatggttttccatacctgatgcccagcactgctcaaccttcagtttctattcctaaccattccctacatggttaccttgcaaagttacgtgcctttaggtaaacacttcccttagcattctggcctttctctctgttgtccccctcttgagaatgagacataaatatgtagtttctaccttgactgatcaatatcagctaaacagctttgacaaaatacatgtccctcctccagcaattctgaggactggggctccaagcatctatatttttaaaaagctccagatccttctataaaaagacaataatgaaagaaaaaaaacggagtaggggctctggattctgttgcccagctagtgttgagagctactggccagaattctcacagtacaagccttggtaagcagcccttttactttctctctgtgccactagaagatttttgaatggtgggtctttgggggaagacttgttcaacacagctttattgctttatctgagtatgaataaaataaactcatgcagaaaatttttaaattgtgaaaaaagatgaaaggaaagtaaaaatcacccccaatcctactagccagagttaattactgaaaacatcatggacaccatccattcaaacactatgttagggactctgtgagtgtgtgtgtgtgtgtgtgtgtgtgtgtgtaattttgtataaagggaatcatgatggatatactgtttttactcactgcatcttgggcattttttagcaagggtgggcattttaatacagttaggagctagactatatttttagaaggcagggtaaatttcaggtgaaatgattaggatgtggaggtaatagcagtttggagaggtgagctgggcttagatggtgacattggctcctcctttttttttttttttttctgagatggagttgcacagttgttgcccaggctggagtacgatggcgccatctcagctcactgcaacctccgcctcctgggttcaagcgattctcctgcctcagcctcccaagtagctgggattacaggcatgcgccaccatgccctgctaatttttgtatttttggtagagacggggtttcaccatgttggtcaggctgctctcgaactcctgacttcaggtgatctgcccccctcggcctcccaaagtgctgggattacaggcatgagccaccatgcctggcccacattggctcttctaagtgttgtgaatgtgttgggacttcagggtagtaagacagtgagttgtagactgaagactaatgcatctaggttcatttgggttatagcataagaaggggaagtgaagatgcctttcaaatggtatttttttaaaatgtgtgaatacttgaatgtgttagacatgttggcatctaacagaagatataatgtgaaagggagtaaactgaaaataaacttgtatacatttcactgctcataaagaatacaattacgtgtgtgaggtgtttgttagtgtctaccttcctggactcttgtaatattggatgtgatttttatacgcagcagcctgcaggttgctggggaaatgctctgtgtatttaatcatcttgcagtcttacttgtttgttttttttatggtaagaaaatgttgttggcttgcttttgtagccagattgattttgcttgtgggtgtccagatgctgatgagctgtaattagcataagaaggaggttgaaaagatgttgaacattgtttccaggtagccaaacaaaggatccccaaacagaaattattctcaagtatcaggttcaagagaagcagcccttttctcttttaggagcagtctattaaaggatgtgtgtgttaggctgggtaggtcaccactacggatggggctgtagaaacttgctgggagctggtcctgggggtgattttctgacgctgaacatctccctttgtgagagtagtaaatttaaatcacttgggtagtctagtagaaagtagccctgggctgggttcagaagacttgggtttgtgtttctgccataattgttgtgcttaggttctgtgacttgagtgtcgtttgttctctgaacctcagtttcctcacctttaaaatggagacaatgtttcacagcatgtgagaactggataagataatatacgagaaagtgatttatatactataaaattatgcacatatatgacatggtagtgttgtggtgtgtattacattcattgtttttcccgtctcttctacatttcttatactttttctaagtaacactttccttccttgtccctggctccaaagcagaaagaaaagtatggtaatttggtccctgtttgctgcagggttatcataaaatacattaagcatgtcattttgataatcacaaaaaaaaaaaagcctacaactttcttaaatgtattgattactaataaatcatgtctatgttaagtatgcctgctggctcacaaacttctggaataacaatgtttgctagcctagttaactgggtgattttcctgatgatgtgtcatctggtctgaggctactgtagatattgatgatggcgatagtgtgatagtgtctcacattactgagtatttgctgtgttccagggtatacatgatgtcattatccctaacatcaactccatgtgggttatcgttagcctgctttattactgagagaacagccccaaataagttaagtactttttcaaattgtgcagacagttttatgtctgctagggccccccaaagcctgtattcttgatcccggacttcagtctcttaaggagacgtcggagaactaagaagttacatgaattttaatcaccaaggcaacaatccagtacctttagctgttttagaaataaactagaaagatttttaattctgacatgccaaagcaggaaacctctatgaccaggattttttgtatttggtaatgtgggatgtgaactttttaaaataactttattcttcaattttgaaataatgaaccatgctataataaagtttttaaaatatatttcatacaaagttagatgtgtttttctaagctacaagcttggcatgagtttcagtagcagggtggtgggaaatacacagccttttagaaaatgcagacttgagttcaaatcccagctcacaccagctgtataacttttggcatgttaattaccttcactgatcccagattcctcatctataacagtgcttcttaacgtttatatcacagacgaatcacctggagatcttgttaaaatgcagattgtgcttcagtaggtctggggtgaggcctaacattgtgtatttctaaccagcccccaggtaacgctgaggctgctgcttctctgaccacactttaagtagcaagaatctataaaatgggatattgatatctgcctcacaagtttattgtggcatgtagtagatgcttaacaaatgtaagtcctcttcccttctcacatacctgggagtctcttggggatggcctttatttaagaagtgggtctggaaatatctattcctagcatgtcttatctctgtcaaaagtcccagatgacagaaagcatttggaaagtaatgagctcaggattaagctttaagatgaaagaagcccacatctgattcagaggctcatcttaaggagttagcccagaactggagtcatttaggaagtctctgtgcaaacctttgtaaggtggctcaaaggaaacctcaactgacttcttccatgagttcatcattcttcagttcttcagacaatacctgttgaacacttaatgattccaggcaaggtttagatcctgggagacagtgacccacctcagacccaccctagaggcacttacctttctgtggggagacagcatgcaaataatgatttatgaagttgtcattggaagcactgaaggaggaaatagacttccagtcaactttgggagatcctccagtctccctgagattagaaagattgaaagtaggtagaaatttcccaagtggacaagaaacagaagagcttttaggccagggaatagcgtatacaaaggcacagagaatgtgttgggactctgggaaaggcaagtattccagccttgtggtcttggggtttgacctaaaagctcagtgagccagactactgtctttgtcaagacttaatagatgtaaacaggcaggcagaggacctggaccaggacagccttctcctaaatgggttggatcataatcccgaaagatacagtcccaaatgccataatcctgaatgttgaaatccttgaactctaaaatcctcaaaatcagaatcacaggaatcagaataacttcaaaaagagcagcaccagagaaaatgaatgtgaatatattctccaaggagagctatgtcccaaaagaaaaaagtagcaatttattgtgacacaagacttgaaaatatagttaatgattgtgaaagtcgaccacctcttatggactagctttgtgtaactgcccataatctgtctctgtaatatacttttcatatgtcaagttttctttctgttgttcttttccttttttaggctcccctcaccactattttaaattgttagcattatttcttacaattcactttgctgtatatttcatctttgcgtcatttccaatactgcaggtataaattgtgtaggggcttttagagatttctacttcattttatgcattttttgcaatttgacttgacaaaagtgcattgtcaaatcgcctttgtgtataagcattgtgtgtgtatgtaaaaatgttgaaacttcccccgtaaatgaagagatgtctttttgtgtatctgcatttgttcaatgtaaaatttctcaagatctaggctctttgggtgactgcatatgtacagtggtgacccatcattatttttgattgatcttatcaagacttaggttattcatcacaatatttcagatgactgaaattataaagttgggtgcacaccatcaccaaccctagtgatattcacctgtacattttcctttttacttacctgcctcattatgaatagggtttgtctgctcataactgtcatacctgtaccactgtcattggtatacctgagtgtttatgcttgcaaaaatacatatgtaattattgcctattttattgtggaaagtggtctatgaagtattctgtcatgtttttatatgtttctcaaataaacccctttttaaaatgtaagtaagtatcttttaagaattttttaaagtattttttccagaattacatttttgggattttaacattcagaattatgattggcttccctcctacaccagcctgagcagacacttctagccacagtgtcatagcttttgtataagcctaaaatcttcagaaatggagagtcaagaaggagccatagcccacatattattgtcttccttgagtgtcatctttaaaatctactaaattcattttatcttttaatatcttttttttttttttttttttgagacacagtttcgctctgtcgcccaggctggagtgcactggcatgatctcggctcactgcaacctccgcatcccgggttcaagcgattctcctgcttcagcttcctgagtagctgggactataagcacgcaccatcacagccagttaatttttttttatttttagtagagtcagggtttcagcatattggccaggctggtcttgaactcttgacctcaggtgattcacccgtctcggcctcccaaagtgctgggattacaggcatgagccaccgcaccctgcccttttaagatcttttgtagattcttctgtgttgatactggtttcggtctccttaaggcaaatatttccttctgtctgctttggagttcatttaatgacatcagttagaaataacataataacataagtaaggtacataagtacctcttgaatttaatctccttgcaattcataccatctccagtaggaactctgctccccttagttcctctctcagataacgacaaccttcttctccttactattggaattcttgccactctacagtctatcctatgctccttccagtgttccagaagacacagattgatatggtttggctccgtgtctcaacccaaatctcatcttaaattgtaattctcacatatccagaaagggacttggtggaaggtgattggatcttggggccagtttcccccaatctcttctcgtgataatgagggagttcccacgaaatccaatggtttaaaagtggcggcttcccccacgcgctctctctgtctctcctgccaccttgtgaagaaggtgcttgcttccccttcacctcctgccatgattgtaagtttcctgaggcctccccagccaggcagaactgtccatcagttaaacctcctttctttgtaaattgcccagtctcaggtagtatctttatagtagcgtgaatgtgaactaatacacaaatgaactgcctctggtggctgtaaagtatgaataagatcacgtgattttgctgcataatcctttcaggtcttcttaatacagatctagggtaaaatctagacttttgcatgacagaagacctgcccctttggccttctcttgccggtaccaccttgctcatcccctgccctgtttccacctagcctaaactagggaagcccctcctggtgttactcttttctctcctccacatcttgacattggatgcatcccctgactgagatgctcttttacccacatctctgtaagactgattacttactcttagaaatctccctcatcctacttcctccttgaagcctctcctgattttccatttctgttctgagactgcttcctttcttatgctcccgacagcatccgttttgtacagtggtggttggcttgcttgtttccactcagctgtgagctccgctaggcaagaactatgccttacgcgtgggggtggataggaatcccttttgtcctttatatccctttaaacagacttaatcaaaaggaaaaaataaatctttttattagggaaaatttcagaaatatacaaaggtggagaaaattatatattgaatccttatgtacccatcactcagcttcagtgaataacgttttgccagtcttgtttgttcccctcctctctttttttcttgtaatattttaaggcaaccttagacatcatgtaattttacctcatgtggaatttttaatttataaaatcaatgactgatatgagcaagagccttggatttaggcattttcctagctggaatatgtatgttagcaatagaatctattgatagttcagctgtatactgttagatgccagaagtaacttagatcagattttctcacccttggcactattgacacttagaaccagataattttttgttgtggagggctccccttcatattgtagagtgttcagcagcatccttggcctcttgccacagctggatgccagtagcaacccccagtcagtcatcacaaacacacacataaaaattgcagaatatctcaaacagtggaatcctcccacccctccccctgcacaacccccaactgagaaccactgtcatagagaaagggaagaattttatagctgttgagatcttccagatctcaggactgttcaatagacagttggggaaactaagtcccagaaaggaagtgtgcctttctgattattactgtgcttattagtatcatgctagagaataaatctgtattttctgcttcctgtgccagcgtgtgtctaactctaccacacgtagtttctagaggctaccagggtgatgtcagaggctgcctaggagcaggaagaattcctgtggccgtggtgtgggtgtcttccctgaacagagaagatgacatggccaggctgaggggagttatggaatactgctgccagcaaggacacactgctgctgatttgcagccatgcccagcatctgccttggctgcccgtcattcccttttaccaaatatttatgatgaagcgggctggagagctctttccttgggaatgcatcttggattccatagtggcagacaagtagaatttgtttcacagaaataactttgaagttagtttttgccagaaaccatctgttttatataaagcaaagggacattggagtttcagtttatagctttgttcaaaatggactctctgcttatttctcacaactcattctgctaagcagcgccctggaaagttgggtgctagtaaatttagtttaccactaggaaggcagatttaggatggtagggagaaagctggctcatgaagtgagatcaaagactctctggctctcagtagctctgaaaacttgggtaaggctcataacctctctgggccttattttttcacatctgtacaatggggagaataattcactccaggggtggtcatgaatattaagtgagaaagagtatatgaagcacccagcatgtgaatccagcacacagtgctaataaatggtttttcgctcctcagaaagacctgtctggaaaggcacgcagattttgcaggcccttagttctttatttgtacaattctaaaatggttgcactgggtgtatagaaagattaactttggagaaaatgacgatggcaacaaagtacttaatatatttgccaatatatattgttgattgtacccggttaataaaacagcatggactcattcttcacaaatgccatatgttctttaggattaactgggttattttatctcctctctgtgatgagtctgatccctgttagaatgtggtcctgaagcattttcactacagagatgactgcctgtttttccagtagtctctgagcatgaaagattataggatggtttcatttgttagtctgagactagaaaagaaagagctatgtcagtgcagcgctgaaattcctcctgtcctctaactgccgcctgactggctgaaggaagaagggtcaagaaatcagatttcaagaaagtgaacataaggccgccttgggtctgcagcaagtttttctggtttctgtggaaatcagctgaagccctggagcctggagggagtgtgagtgtgtgtggagctcaacagttggtgaggctgcagtagcttcaaggaggactttgctgcttaatgtgggaagaataggaggaggagggagcggctgtttgaagagcagaaaggcaggactgtcgagtaagatgaaagcagtgaagaggtaggtttagatcattgctggaaggccctggaaacaggccccctcccccaccaactgaatttctgtctaaagcaggcatccagggaggattttcagaggagtgtgaacaccttctttgcattgggactgtggtgttcggctctcctgcaccagggtaggttgatgcttggacagtggggaaatggaagaacaaagacattgctgatgagggagaatgtagggaaattcccagctgagccttcgtgctcagccttgggtgtgtggctccaggcccttgcatgctatccagggctagtgagaagacagtgagcaaaccactgaaaaggactccttacaaaagaccaaagtctcattttaggatctaaagatttttttatgtgtttagttgggtgggggtagggagaggagtggtaactatataatatacttttcaaatcctgaaagagcttccagggcacaaagtcagtttaaattactttagatgagctattgctaaaagtgatgcgctgcaggaaaccaaagggaaccagctgcgctgacgtatagctatcttcattagaggactcgggctgaagctcagaagccagcctcatagcacttcttcagcatactgccattacaaggatgtgagttaataagaaaaaactgtgtcgctgcttccagcaaggttcttcggagtccatgtgtaataatgggaaagtgttctgaggagacccttgacagtgaggcgaaaagaagggaatgcaccttttcaccaatgcttgcatttggcactaggaccttcctcactggattgtgtggctgcttccaaaaatgagtgtgatcgtgcactcagctttgcttggggtaaacgcctgaattctcaggactctcaggctctcttttggccctacttaggacttcctagaaaagaacctactggattagtgtatcaggaattgcaattgattgttagtaacagagactagaaataacaatgatttaaacaaaatagatcacataaaggtttatttctctctcaggtaaaaacaagtccagaggtcagcaggactggaatggcagcttcgtggtgtcattgggagcccaggttccttctgtcattctattctgccatttttatcacagggccagggatgtttgtttgctttttaatgtgccccaagcacctataaaagtgcctggcttctattttcaagattgcctcatggtcccagatggctactagagctccagttattacgtctatattccaaacagcaggaaagcaaaatggggagaaggaagggcagaaggacacgtgtcccctccgggaagtcccaaataccagttcaacccgaatctctgacctgacattaatcacatgatcatacctaactataagggaggttgttgtgtatgtgctttttaagctggtcacagtatccctccaaataaaatgggttctatgactaagaaataagagaatggactgggcgtggtggctcatgcctataatcccagcacttttagagaccaaggcgggcagatcacctgaggtcgggagtttgagaccagcctggtcaacatggtgaaaccccatccctactaaaaatacaaaaattagtcgggcatggtggcaggcacctgtaatcccagctactagggaggctgagacaggataatcgcttgaacctgggaggtggaagttgtagtgagctgagattgcatcgctgtactccagcctgggcggcagaatgagactccgtctcaaaaaataaaaataagaaataaaataaaaagagaaactgaggccgggcgtgacggctcacgcctgtaatcccagcactttgggagaccgaggtaggtgaatcacttgaagtcaggagttcaagacaagcctgcccaacgtggtgaaaccccatccctactaaaaatacaaaaattagctgggcgtggtggtgggcgcctgtaatctcagttgctcgggaggctgaggcaggagaattgcttgaacccaagaagtggagattgcagggagccgagatcgtgccattgcactccagtctgggcaacaagagcaaaaccccatctcaaaaaaaaaagtagtaagagaatggatattaggcaactggcagtctcagccagtctgattgctgccccttggtgtatagagcatccctcttgggcagagtttagccaggccttctctgagttcctcaagtcgctggtgcccagctcatacttcatggtgctccccagaattagcatttttcctcagtccacactgctgccattgtagcgatggggttggtttcactgacaaagcctgttgtaggagccatagaaaatgagataggaaactacaggctggagtctccttttccacaggaggcggcggtgtacacacatcgcaagcactgaaggcttcgtggacctctccttcaacccatctgagatatgggccttccctaatatacaaacacttgacctaggaaacttcatgccttctgcccaagctctgaaaggtgatgtcagatgccacatcattccggtctgttccctctgcattcatagagagaagtaatgtagcacagaaaagcatttcctaagcatacatactcacttcttgctgcaaggcacattttcccacagatacagtgctgtaaattagttaaggtaacacttaaacacttttaaaatccataatgcgctggaatattctgaaagaagagaatggaataccatgggaacagtgaaaacaagtgagttaaccaaaggcaacagctatcatgttgctttgcacccagtaggtgcttagacaatgcttgtggagcctcatcacaactgaaagatgagactactgagttaattttggcaatatttcacattaaatgggtttcagtggacctatttcaatggaaaaggcattcaaaatttcaaacaacagacataaaaactgctttctggaaaaatagcctttgggtatctcatcattcatattccaagtgcacactttttcttgcctccttctcaacattttcttaagataattttcaaacatacagaaaagttggatgagctgtatggcaaatactcatgtacctgccacccagattctacaattaacatttttctgtatttccctcaccacatgtttatccatgtctgtgtcagtcatccatccatgttatttttgatgcagaaagtaagttgcagacagcattacatttcatccttagacactttagcatgaatataaattaactgagtgtcgtatgtataatacgtatttttaaataaaagtaaaatgcatggctcttgagtgcaccatttgagtgatgataaatacaaaccatgttaagatacagaacgttcccaccaccccagagcattctctcatgccccttcctgggcagatccctccctgtgcctcacagaggtaaccactattctgagtttttaccatagattaggttaacctcatgtagaacctcctatcaatggactcattcagtgtatattctttttgggttaggctttcactcagcatactgtttttgagattcaccataggttgttacatccattggtaatttgttcctttttactgctgggtagtattccagtgtgtggatttatttttccattcttcctattgacaggccattatgaacagggctgctataaacattttttgtacaagttttattgtggtaatatgttttcatgatctcttgggtaaatatctaggaatggaattgccaggtcattgggtagctattcacatctcttttgataactaagatcttataattgaactgagagaggaccttataaatcatccaggccacctaattttatagacaaagatgttgagacccagagaataggtggaaaagagaactgttcaaagttacagagaagatttttctcaaagtatggactagaaacccttgtctcctaactctagcgttctctacagcagacttccctttttcccctgagaaagaaggaaatcaggattctttccagaagatcattaactctttctgttgttgcttggggagaattaactgttagatatacccgggtgcaggagattgtgcttgatgcctgtgcttctgtagtatctggatctgagcctgcttctcctccagtgtacatccctgcagctgttccaggatggtctttgtggaacgtagacctggtcatgcagcttatctccatcaaccatcatgcagggcctgtgggagaaagtccagactctgtagttgagtgtgcaggcctcttgcttctcttgcctcaccttccaccttattgcccatcccctgcagcccaccccatgccatgttccttcatatctctgggcctctaaatctcttgtgtttggtctggaatgcgtttccccctttgttgccctgataaattccatactgtttcttcatgatttggttcatccagaccctctcagggagtcagttacacctttttatacatacgtacctcttcaagctaacttaccacggtggtttgttatgatatcacattcagcattcgttgaactcagcacaggactagacactgaaggtacagatacgactgagacgcgggcctggcctttgagtttaccatctattgagattcctgtaacaggatagtttcagtacaacacagtaagctctcacatgtgttgcagagaacgagagctcatctccgcacatccttacaagcattaggtgtttgaaagcttcaccacatgaaactatctcatgactttacttgcattactagtgaggttgaatgcttttttttttaaaaatatgcctattgggtatattttaactcttgaggaaaacaatcaagttgtattatggtggaactaactaggtcacctcctagctgtgagaccctggaaggcaaatttcttttgccaactgagtctctagttccttgtctgtaaaatggggagactaataaaatgtgtttcataggattgttgtgagaattaaatgagataacatgtgtaaagcacacacaggcacatagtaggtttgcaatcgatgtggcctcttggagttcctggcccctagcccagtgcctgccacctatgcactattcagtgtttgtgaagaatagggatgtatgtaccccgtgtatgtgtaaaaggggctatatatagatgctcacacagatccatctgtcttgagaagggtatcaatattcagccggagtggctgagcacacatgcgtgactcttcttgggttgccacatcccctgctaggcagatgtccattataatgaaatgtaagaagggaaaaaaataataataaaggcagaggagtgtaatgttatggcttgatttgacagggcctcctgctacttcagctgccagtgccagacatggaacagattaatctgtattccaacacaccactgctgaagtcaagatcgatctagttagggtattttaaacatcctgtttgcatctagagtcttatcagaaaccaggacgtctgtccatctggggggcagggggcaggtgggtggcaaggttcagcaataaaagagaccacaggctgtaattttggaagtgagagaagaacactgctgtttgatttccttaaaacaaaagagctaatggccttagatgttctgtggaaacaaaggcagctctgtagcatggccttgaattttaaagtggccctgcaagatcttgccaagatatgggcctgatggttggagtgcagggaccatctccatcctaagaatagaactctggctgacccatgtgtgtctttcttaaccatttgagctgtggaaggcaggtgcaggttctgaagccgagtgggcagagcgaccaaccaggctgggccagtaggtaaatgccaggccattgggatgatggtgagggtctgcttttcatagtccaacgttcatatttatctctgatctgcaccccatctttccaacctcattacttttcatccttccttccctcctgcgacattgatctctttccagttctttgtccgtatcctgtgctttctaatttaattctttacttcatgttggtctgtccgcttggcatattcttgctgtcattcccccctcttccctgtacctgtccttcaagtcttaactctgatgctacctttcctaccattcttagctcctctggctgggagagcattttctccatcattagtttctgcccctgtcccatttgctgtcattttctataatgtaattttatgtatttatttaggagacagggtcttgccctgtcacccaggctggagtgcagtagtgcgatcatggctcattgcagccttgacctcctgggctcacatgatcctcccactttagccccccaagtagttgggatcacaggagcgtaccaccatgcccagctaattttggtatttttagtaggagacagagtttcactgtgttgcctaggctggtctcaaactcctaggctcaagcaatctaaccagccttgacctcccaaagtgctgggattacaagcgtgagccaactgtaattttttttttaaattttaacagctttattgagactgacatgtgaaaaatttgtatatttaaggtataccactttttgttttgatatatgaatggtatatattataaaacgatgaccacaatcaagcaaattaacatatccatcatctcacatagcattttctgtcatgaatcttaacacattgtaggattcttatacctattttgtcagtaaatgaacgagtcctgtgccaaagattcctaaaagcctcctcctgtgacccagctccgcttgctagggcctccttttcctttctggtgaacggagccttcccctgccctgccattttaaaacttcaacagaggttccagcaggacccctctagaatctggaggcacctctcttggtacagaaggttgagaaagtcaaatttagggattgttactgtgcaccttgtcacttttttccttctattctcccacttccaccttgggagacttgttaatatacataggactcatgctcctcaacgtaccatggggttatgtcccaaaaaacccatcatgagttgaaaatatggtaagtcagaaatgcatttaacatacctaacctaccaaacatcatagctcagcctcacctaccttaaacatgcacagaacccttacattagcctacagctgggcaaaatcatttaacacaaaacctattttatttttttaaaaaagtgttgactgtatcacataatatattgaatattgtactgaaagtgaaagaatggttgcatgggtacttgatgtacggtttctactgagtgcatattgcatttgcaccatcgtaaagacaaaaaataagtcaagccatcataaatcaggaaccatctgtattccatttatccctgactccaagaatgtggcccagttctaggcttcaaaaactaagtgtgcccatagaaccccaaattctggtttctgtccaccaactttaccactgaaaacatgaagctgctagcgcatagccattcacctgccagtgtaatacatccagccctgcatctctcccagagtcttggaggaaaatgtttttcttctgtctcagttctgacctcttaacttccagtgtgtagccactcctactcaggccctcctctttcctaccccagctgaattaggggtccttcacatatgcgctgagtattttccatgcatgccagttaattgtgtactctattgtaattgtttatttcttttttctttttcttttcttttttttttttttttgagatagagtcctgctctgacacccagactggagtgcagtggtgcgatctcggctcactgtaagctccacctcctgggttcacgccattctcctgcctcagcctcctgaatagctgggactacaggtgcccgccaccacgcccagctaattttttgtattttttagtagtgacggggttttaccatgttagcccgggtggtctcgatctcctaaccttgtgatctgcccgcctcggcctcccaaagtgctgggattacagtcatgaatgaccgcacccagctgtagttgtttatttcttagcgttaatcataaaatgatgagcttctctagagtgggctagctttcatcactgtcgtcttagtacttgctacattgcctggcacatagttggtactcagaattttgagaaaagggagggctggtgacgtaccacttcatgccctataattatcataagattatgaaactctagaaggagaagctaatcttcatttctttacagatcacacattgtattttcagttcttgcaggaagaccaaaaggcaaatgattatcatggccaagtacatttctttttattaaaaggtaggaccatctctacttagatgtgctgtgtccttcaacttactagtaaatagtcactacccaccttagcactgtctgcaggtctcccagaatcttgtattatttggctttatagccagcgacacacaagcactttattttaatttattgtgggattagagagtctgagcgaagttggccttgctccattttagggttagaacaaatcttgagttagagaaaatagccctaccagctgagagagccaagcaatctaggtttctgtttttctcagcaggagccagtcaggatgaccagggctgactgaaacatgttcagtggcagacatgtgatcaggttgcagtatggaaggagttacctggtgatctaggacaggtgcgtaggtgagcgaatcccttgtgattctctttttcagtacaacagatctcaaactgctgtctgttgagtgcctactatacacatacctcatttgaaagaatgggtttaatagatgggagggacagccccagcttacaaataagaagactgaggctcagaggctaagctccatgcttgtggcttaaccagctagtgagtgccagagacaagatttgaatccatgtccctgtgatcctaaatccccacataaggttaattaattcacttgttggcatgtctggagcagatcccaggagttagtgttctccatgtacctgtgtgtctttttcagcaatggaaccataataggcctactcataagcaggcccatctatggataaatagctctcctcatagagaatgggtaatgttaaccaaacacctgctggaatgtggaccatactttttttttttttttgagagtagggatgagaaatgccagtccatcccattcttcacaaaaatggtgcacactataaatggctggttggagtgactgccacagtctgtgctgttctggaaagacctctgatttgggtgtactagatcaagcgttcttaactaaagagccatcactaagagatgtgaatgctctgaaactccatggaaaatgttacatttgtgtatgtgtttcgggagggtagcatgcctccgtgtgtatcagtctcaaatgtctgtcatgatttggagggaaaagcagatttagattccagtggcccacaaaggtactttggacctgaggcaaatcacattccttctcagggctattgtttccatactcagaaccccagaatcagatcagagatttctagccctccttccagctctgaaaattataaaactcgaactgccccctggaaaatcaaacttttagccctctcacatagaaacaggcatctaaccctttgctaatcatccttgagaagccctgaagagagctgagctgggggaagggtgggccagagcctccctccaggcggtttcagtagttagtgtctgtctgaggcagctagttgtctgactgttgagcagggagcccagcaggcagggactctcactggcacaatttcaatcctggctctgtaacgctccacctagatgccaggctacctacctctctgcctagtgatttgaaaatgtagatttgcctggccttccccttggtggagccttgttgcttctgtgtgtgtgtgtgcgtgtgtacatgcatgtgtgttttctgcacttcctgggccctcccttagaggctgttctctgcagtgggaactaccacatccaccccatctgcattgacagctccataaccatccttcacctccattttatcctgtcgaaatgacggagcagctgagcagtgttggccagcagataaacctgttatcttgcctgctccctgtgccagcagctctccccgtctccttggtgcatgaaaaattgacaccaccttgggctgaaatctgttcttagggaagctacatttattagtagctaatgaaactcggtgtgtgtatatatgtgtaaatttgggatggctgaagtgtttccctatctggccggcaccagtagcctatggcgtgcctcagcatccagatagagaggtagaagggcataggcatcaattggcaacctatccttcacttaaaatcccaaataggtaaatatcatttattcttagtataccattgcagttgatcatggtataccttgctccagactgtggtgagccgtggaaatgcatgccagtgtcatgtgctgccaaagaagatggttattctatttattacatttttctctttgaaaattacagcttctgataccctctctgtgccaccagcacccagccctccctcccccatcttgttgaggtatataaagaacattctcttgcaactctttctcatccatcttaatcagcaagattaaaagggaaaattattgagaagttctggttcagtatttttgtggaactgcctgaaactcaaagtctcttctttatttagactgtggtggaaattgcttccgcaaagactaattctgtaaaatagagaaagagggttgttattcatgtcttactccatatggccttttacttcattttactcttgttaaaactgttaattttttaatccacatttacatagtgtctgtcttttgggcacagtgagcccaaatatgaggcgtattttcaggctttgcatggtctcatttaccttccttctttaatagcattgatgattgccttttatatgtgggaagcataacatggtaggaaaagcttacagtttggaatcaggcgacttagattcagatctaagatccagccacctactcaagcacatgaccttaagtccgttaatctcaccgagccatgggttccacatttataaaatggagatgtggatagtaccttttccacagcttagttttgaggattcagtgaaaaaattgtgtacagactcaagcctactggcatagataaacagtaacaatgatgacagttattattataccctacttacgttcaaataggaattagaaggagctttcaccaaaacaatatggtggcactaaatcttagctttgaataagaatttgtcaaaacacaaatgttaaattagggaacctatttgcaacatatttggaaaagggtaatatgcttaatttataaagagttcatagaagtcaaaattgagcaaaggataagggcaggcagttcaagaaaaagcagtacaagtggccagtaaacatagtgtgatggttaattttatgttaagttgactgggctgtgggatacccaaatcgttggcaaaacattattcctttgggcttgggttggtactactccattggctttcctgggccttcaacctgcagataacagatcacgggccttctcagtctccataattgcacaagcccatccctcataataaatcttttcctgtacatttttatatttcctattctgtttctctggagaaccctaatacacataggaaaagatgtttaacctcattcgtaacaagaacaaaaacatgctaatcaaaagaagatctcatttttcacctactgggctgtcacaattactaagttggataatatgcaatctgagtgaggatatgagaagacagatgctcatatatatactaatagtgggtatgtcattagtacagccattttggaagacagtttgtcagtgtctttcaacatttcatgtgtaaatttcttttgatgctttaattccactactaggaatatgttttaagaatatttgtgcaaaagtaagtcaaaatatgtgggcttgtatactcattgcagcattgcttctaatagcaagaataaaataacgcaaaactggaaactacctaaaatacccatgaatggggcgctagttaaaattgtgataaataagctcagtggaattctagatagccatttttaaaaaatgaagtgtgggtgccgatatggaaatatatattagggaatatttagatatatgaaatgcaaaattttccccctgaaaatgtacacaaggtaccttgtagtttttcttgggagagaagaatgggttcgtggaaggaatatgggaaaagaaatatattagtatagatgctcaataaatatcaagtacacgttgtaccttttcatgtagtttgatttttacctcatacatccattgcttttattttaaactccattggtagggggtgaagggaatcagtaacaacaaaacagtaaaagaaattgctttctgtggttgtgtgtaaattcatctttgagcttcctaatagcccaggcaaagaaggaacattgataaggaaatacaaaaaatttatcaggaaagagaaacattttcttgatcttgatctctgaaaggactgtggctgctgaggagattggtgtaaactcagatccaatgctgtctctccccagcttaaaattcactggtaggcccttgcccctgttctccatggtcagcctttgcccacctcactggcctcccctctcccacatggacatggcagtccattcatactgacttttgcatatattgttccttctgcctggaatgttctctccttttctctgccttgttgttggctatggctcttctttgttttttaagattttcagttgttggttatgtccagtaggaacccttggaagtcagttgtccctcctctatgttgcccacgtcctgtttgcctccctcagtaatggaacttgttacacagtgctataattgttttgttttcttcactaaatgaggagcttcttcaggttagggagggtgtgttgtttgtttatggccctgaacactcagcacttgctaggcacagaggtaaactggtcagtggatgagggagtaatctgaagtttgagttctgcctcttccaccaattagctctgtggacaagtcacttctctctggcctcggtttttccatcatacaatgagaaatttggctcaaataatcgatgagaactttggctctgattttttttttcttcctctgtggttgtcagattgtcatatatataataccaggatgttgtcaccagctgtcatactaagtaattccaaagttttagaactgatcttgttagaattcactgcatttattatggcctgtcccatatctgttcaccagctgaagagatcacagctacttccaacttggttggcacaaggttacagagttgattctgtccctcattctttctgcccctaaccttttctcgttggcatacacaaaggtcagagcactttccctgaagtgcatcttcacagacgttcctttcttatcctactttctcaccccgagctgagctctgttagctcgccatccttaccctgggttcatggggttttttgtcttcctgtgaaggcagggcccgttctctccactactttctaccctcatcccaccccagtgagtgactacggcagacggaggttacaccacctcaatcccagctttacataaaagttgaaaggaagatactgggggagcctggggtcttgagaaggtatatagtacctctgtccacagcatattttaagaaaaatgttatattttcaatacctaaaaaaatggattctaccaattagaaatatgttattgaaattgatggcgccctcagaaaaagctgtttacctgctcccacgtacaaaaactctttaagaaccatcttgtaactgaacaatttgaaagcatattagcaatgcaaaggtagtattgctctgaatttgggctaggcattatatataaaagtgcaaaagtatttgaaggcatttgaaacatatccagaattcaaaagtggcctgtttgcccccatgcccacctccaccactgaaaacttttatatcgatagcctgctttcttcccattcattcagcaagtattcccaaaacacctaccatgtgccagacattgttttagaaccggggatatggcaatgaacagagcagacttaaaatatctgccttcagggaatttgtattctaattgaagggagatggtgaacaaaacaaataaacaaaatacagtattttggaaggtaacacatgacgaagagaaaaataaagcagataagacttgagaatagccatgtgaggcattgcatttttcaatagggtggtcaaaggaaagcctcgctgagaggatgacagtggagtaaaaccagatttaaagagtaagtcatgcagataatctgccgcggaacatttcaggcggaggaaacagcaagtgcagaagccccgaggcaggaacagcctgacgttagaagcagcatttagtctgagttggggagtcactggagtgttttaaacagacctgacgttaggtgttaacctaaggaatcatgctggctgctctatggagattaggccaaaggggacaagggtggaaggagagggacttactagtaggctattgactattccaagcaagaaatggtggtgatgtgaatgagggtaatgtagtagcagtggtggtagtagtcagaagaggtgggatactggatatgatttgaaggtaaagctgatgaggtttctcgtgggatgtgagaaagaagagaatcaaaggcattttcactggttttggctggagaaactggagattctggttgccattagttagatggaaacaactatgggaaacaggtttagggaggaagatcaggagcttgtgtttggacgttaagtttaaaagaaccagccaggcacagtggctcacacctgtaatcccagcactttggaaggccaaggcaggtggattgcttgaggccaggagttcaacaccaacctgggtaacatggctaaaccccatctctgcagaaaatacaaaattagccagacatggtgttgtgcacctgtaatcccagctactcaggaggctgaggcagaaggattgattgagccttagaggttgaggctgcagtgagccctgatcgtgccgctgcactccagcctgggtgacagaatctgtctcaaaataaaaattaaggaaaaaaagttgataggatgttaggcagccaagtggagagggcaggtagacagctgaatatatgagtcagcattcagaggacaggactgacctataggttcaaatttgtgagttgtcagcatgtaatggttttcaaagccataggacaagatgcgattaccagggaagtgaatatatatagaaaatagaaatctaaggactgaataactccaacattaagaaattagggaaacgaggggatggggaatgcttattaagtgaagaaaaacacactggcacaaaattatatccgtgctataatcagagaagtaagaatgcttccttgtggcctcagtagtcagatgacattcttgggaatccaaggtaactggcataggaagatgctcatcagttttcaaataaactgtttgttgttcacactgtgagcattttatttcaaaataaactttgttctgccatttctccacgagtagacttttgtcacctgcttttcaaggtcattattcttgattttttgaaagttctttttaaagaaaagaatctctttcacctgaagcctataatatacccttgaattaccctcttcttccaagagtagaagaatagtatttcataatagaagccgctgggttgttgaactcagaaagccctgttaactgttttgaagtgcttacagtacagccacctttaaacttgaagcggggatgttagctgcaccagaatgtaagtgatagcactgggtccctatcatatttcatatttaattccaggctgtttacttgggaaagttataaggtaatttgagaattcgatacagcatgtcttatctccattatttgttcatgccatggctggtgttcatattctattcacaggttatttctgtaaaggtgggattagtttgagattctgttgtggacaataaaaatcaattaattccagacagaaaaggaattctaacttagttttgattcacttactcaagttgtccttgaggatctcatctcttttgaatatgttttttgtgcaatgtgaagattggttcggttttttagtgacacaatttaggttcttgtcttattaatcaatagcagcagtcagaaaggcctacttattctgccctcaatagaaccagacgaggcttgaagagaggtaataattactgctctgatctcagcatgttctcttttctctttcccaacccagagcatgtctgttcgatcctggcttccctcctgcggaacctgagagggcagcagcggacccggcttctgaataaattcactgaaaatgacagtgagaaggtgggtgactgttggactgtaaagctgggaccgggactgatagaaaggctctttacctgatgtgatctgagggatactgggttgagtggtcctaccctaaaattctcttttctggcacctgggccctgttgctttgcgtgtcaaaggctcttctggttattctgcttttcatctccaaatgcattctcctgggagtagtaacacctgaggatgataccactagtacttgaggggatttttagacccaaagagcgtggattagactaggatttttgttgagggctgctgcacagcatagcaaagtgattaagagcattggctttggatacagacttgagatttgaacctgttttcgctgcttttgagatgtgtgccactctgaacctcagtttcaccagcttcaacatggggacatcaatactcatcttgaagggtcagtgggaggtgaattagataaggtcttactaaggtggtggtaataaaatgaagataatgataaggaaatggtagagcctgccctaaatgggctatggaagctgggaactcaattacatgaaattagatggattgggctatggaagctgggaacccaattacatgagattagatggatcgggctatggaagctgggaacacagttacatgagattagatggatcgggctatggaagctgggaacacaattacatgagattagatggttcgggctatggaagctgggaacacaattacatgacattagatggattgggctatggaagctgggaacacagtgacatgagattagatggatattttatatctttagtatgccagacgataggatttttaacagtaataagagctaccatttattgagtgactactatggattggataatagagaagatgactttcatcgttgcatatattgttacaacactgtggtttatttatccttgtatagttattatttgcattgacaggcaaagcagttgaagcttagagacattatgtaacttacccaagaaaggtttaagactgtctctttgagctatctctgaccattttttctaccctcaccaggagtatagcatgatgaagaggtcatcaggttaggacacggagatcttagtagtcacgtcaccctagtgacatcagttaacatctgtgcttcggtttcctcatctttgaaatggggtttgctacctgtcttccctgcacaccttgtcaggttttttttaaggtttaaggaaataatggtcatgaaaatactttataagctgcaacattaaggtcttagggtcatcagtgttggctaaagaaggtttgaccacagtcttctcagactgtctgatggcatgttgcaggaacatcacctattaagcaatcagtatcagcacctgggtaaatgaatgccagagttgccaagggctgtggtggtgccaacctgataaaaagataagtcaggagtctgggctggcttcacagtgtttcttcagtcattttggagtcttggggaaaaaacaaaactttttcaaatccactgagtgttcctcaagccatgtttgaagcatgactttgctcaacttaaaactgatttttaagttattgccaagcaaaagtcagggccttttttaaagttgctgaaggaggttttcttgctctctcttctgactcaaaagcaactaaaaagattttactcaggcatttttaaaaaaagatcagctctggggcagaatctgaacatgaaaggtttcagtttgaaaaaagaaatttctgtaaagttctaagtgaatatcaagtgtgtaacttcaagctccttctcttggcaagaagggacttgaatttttatctatttatttgtttttaacaacgtgcattcctgggagttctagaagggctgagaatgcatagcctcctttcgggaatgggcctggttcaaactgcattcatcctaagtgtttgctttgttctgccccagccctttgatccattcctgatgtgtccctaagcaaagcttctctcatccgctgtaaggagtgccagagcgggtctccctttgtaagggagcgacagtgagatgaataggagtgccactgttctcttgctgtgcgttgtctttccttctcactcaagcctgtgaaatctctctttcaggttgacagactaatggagttgcattttaaatatctgggtgcaatgcaggtggcggacaagaagattgaaggggaaaaacacgtatgtatccctgcctcacttttgccagctattgacttgccctccgtttgggtcccttgtgttcctcccatcaccccacaggataggtaagggcagcagtgccatctaacatgttatagaagtagagcagatgatggtctgccaagtggttacgactgctcttctgacacgaatgacaccctttcaggaagaagtatgtgtagcgtccatccaggtctgacctgggagtctgggtggacagcacaggcacccttgacaagagcttctcttcgaaaatctggccaaagtacaaggctgtgacctggtaccatgttggcagagcatgtcttagtactcacacttgctggcttctgaaatcctgaaggaggcatgctgaggaagggtgatcacagcgtagaggagctggaaggaaactgaatggtcctggaatccagttaccccatttacagatggaaaactggagacctagagaacggaagctcagatgcattgcagccaagccaaaccgcaggttctgaagggctgacccttgttttctcatgttgattgttgctaagagaagtgacacctgctggatgttttttctggaggggctgtgcttactatggtgttatcccaccctctgtgtttttcacctccttccgttttgttctccaccatctctggccactgtagctttccatctgtattccttaatcagggtaagttttcctatcactgtttaatgtccaatttgtattcgctcccctacaagacacttctcaagtcttcagtcacattataaaatgacgcctggcttacttttttccaagtctacaggagacctcattttccttgtgatcttgttttgctgcatcactccatccttttcagtcttttcttaaagatacacttgaggcttttgaacttcactggtggaaggactgattttagtatagccctccccaccttcccgtgttgggatcatccagctaaggctaccgtgttgcactgggaattacaccagcattttccctcggggcatgcctcaggccagagtgagagactagggctgtggggatgtggggagacagtgaccttgttatctgtcctgtttctctttgccacttcttatccacctcttccctttcataaaatgtggcaagattaccttttctactagactgctgcacctctatctagaagaccagtcagtcactgaccaacctatcactgcgcttttaattcattccatcgtccaaaaatgtcagagttaccaaaggttgtttaacttaacctgagggaatgagggaaaacatgaagcttgaggggttggatcaccttggctagtatcattcatgaacaccagcagataggtagctgtgcttttcattcttgtgatttccctatgatccctaaactgagtaagtcctcagaagtttgcggattgattgaattgattaactggggctttcttcttttatacagtgatactactgcaagataaaaggcagagactctaaattctgaggctgcactttagatattagcatgttccaccacaattctttcattccaattcaccccaacccctttgttctttaattaaactttccgtttccatcttttctaccctatacagtaacttggacgtgaaggacactcagtggttgttaaattgtgggaataatgtactccttctctttatctgaatgataattagaaacaacttgaaattccctggacttttgtaaggaaaaagccatgagacagttagaactccagccctgacagaatccccgatgttatctgctagggaggttttgaggggtggcaaagagaagacctgggagtcaggggacctaggatttaagagcaagcaccacctttaaatcactgcttgtcactatgcctcatgtagcctcagtttctggcctataaagtgatactagccaaggtgatccaacccctcaagcttcatgttttccctcattccctcaggttaagttaaacaacgtttggtaactctgccatttttggacaatggaatgaattaaaagcgcagtgataggttggtcagtgactgactggtcttctagatagaggtgcaacggtctagtagaaaaggtaatcttgccacttctagctctgagattttggataatcgaggtgaccttcctaagctttgttttctcatctgtaaaattagaataaaaacacctcccttttgggccagacacaatggctcacacctgaactttgggaggccagacatccctacctttttagggtaggccaaaaattttgggaggccaaggcgggcagatcacttgaggtcagaaatttgagaccagcctggccgacaaagcaaaacccccatttctactaaaaatacaaaaattagctgggcatgatggcgcacgcgtgtaatcccagttactcgggaggctgaggcacgagagtcacttgagcctgagaggtaagggttgcaacaagccgagattgtgccactgcactccagcctgggtgacagagcgagaccctgtctcaaaaaataaaaacaaaacacctcgcgttaaaggttattatgaagactaagcataaagtatagaaagtactttgctcagtaagtagaagctcccgccgctgctgctgctagaatttcctagcttcctttggaattcttgtgtaattttttagtaagccttttagtaagcctttttagtaagcagtccttttcctgagagcgtcctccttgccagaaggagtcgcctagcagaagagagggttggcaccatcagatgctttatttgaggtgcagcttagactttttttgagggagacctagtaagtggctgggtgtcagggagcagtttgcacatagctgttaggaaacttggcctgcttcccaaaagattatctattatcagcattgaagagggtgtgaaattgattagcactgacggagagtaatcgctgcagccactctcccagcattcacagagctgctgtgtgccacgggcaccaaggccgtgctgttccctgacaaacatctgtctccttgatgccaaggccgttttgctgggcactggcaaacattccaaggccattagtgctcagcagcctcagtgttacgcagagagccagggcaggtaggggtgagggatgcgtttgtgagcagtgtttgctgctagcactcaggcgccatcctagcagatgaagccgcctcacaggtgtaaagtgacttagaacaatacgacctccttttcacctctgcctcatgccgtcttctctctgaggttgcagacagtttgtctccttgcccccattaaatttgaatgtcctacaccaattgggagcttagcaaatatttgtcgacttgaattgaatgcttatttttcaggcattttgaagactttgactatcagatcagtagtgaataatctctcacatacctcaccaagtctgcaaccaaaaaacctaagataacaggctcaagtattggtatttttattgtctcagccatcaccttccctgtgaacttcagacttctctgggcacagtgcacgtgcccatggtttgcagttgcccaggtcactggagagaatctagtcatttggcaaatgttgatgaggtgcccgctctgggaatgtgcaaggccaggcaccagctgggggtgagaagcaaaagtgccaagaaaagaatgggcctaggggtggtgccgcagacaagggctggaggatccggggagtggggagaggtcatctaaggctagagtcaccctaaactctaggggggctagttttgtggctgagcattcgtgctgaacctaaaaaggtagggatatctagggcatttccagcctggagtgaaacagcaaaggagcagcagtgggaagccaagtgaagggggagagaagagggtaccttccacgagtggagggtgtgagaggaagagcgtgggctttatagccaggctttatcctggttctccgactgtgggcaaacagttgaactgccctatccttattttctttctggatggtgtttgttttgtgtttaaggtgtatgtcccagtttgtgtactttgagaagttatgtatgtagggatatggtgtcggtgaatgtattatgcatgaaagctgcttgcacagggcctggcacacagaaggtggtcagagaagctttagctttcttttctctacaaggactgtttgtgtccccctgccccgcccccgcacatgtgtacatacccactgtcctgattccctgctgctgcaaggttttgcatgacttgactcttccctgcttctccaacctcttctcctgccactaggcccctcctgccacacagcctttgtttccttctttacatttgccactcccttctgccctgagcctcctctctgctatcaggtctcagtaaaatgtcgcctcctcagagaggctttcagtgattaccatttgtaagagagccctatctccctagctgcttcagaacctgtaattatttcatttatttgtttactctctgtctctgggactgtaatctctcttgttcatcgttttctcaggacagcgtgcctcacattcagtaaatgaaagaccactgctcattaggtgaaattaatatctgtctgtgagtattaaggaagatacggcgagtcaccctgcgctttccacattattccttaacactaatttttaaccctgatttttgttttctctgtgattagacctgccaccaaaaatatttaagtacagttctgtggattctgtggcataactatagcaatatttcataaggaaaaatactacttcgaagaatcaacaggactgatagataattctatacacattcagttcaaatcacgtattacaataatctgtaactagcaaagagttccatgtcttgggcagtggccttctgcttttatgttgtattcaaagtctgtgagattccagggccataatgtctctggacataccctaggggtttctggtgagcaagatttgacctgaacttttcaagggcatgtaattcttgagacccatctagtgagcagcagttcttgtgatctgtaaatatccagggttcttgtctcagcagatttcacctgactctccgaacgacttgaagcccagaaaatactaagatgcctgttgttgggaaggcatcctgacttcttgttgattctttcccgtttccattggctaagtgtatagagcatgcctggcttttgactgtcagaaagaagacatgattatataggtactagcaggaatttttctaaaagagggaggagagccttggagagaggttttctcttttttagttcctgggaaaattatactcagcaggtttgttcaataaagtgttcttaccacatagtttgcaccgtaatgacttacaaattgcatgctaattttgtcacagttaaatcattccaggctttacctgaaaagaaaaagatggactccttgtaatgaaacagtatccacaggacttgatgtcttaaacagattttgtcctttgcattcgaagctcatttaaagatttatatggaagggggtgaagtgcaggagtgaatgtggggggtacgtgcacctaaaacactgggtgagatggtagacagtgaaactgtgcggctgccatcgattcttctgctaacttgctggaagattctggggcaagctttgaaaaagaatcctgctgagagttcctcccagctcccttcccactgccagctttttttttttttttttttttgagacaggatctcattctgtcacccaggctagagtgcagtggcatggcgtgatcacagctcactgcagcctcaaactcctgggctcaagtaatcctcctgccccagcctcccgagtagctgagacctcaggtgtgtgccaccacgcccagctaatgtttgcatttttttgtagagacgaggtcttgctatgttgcccagggtgttctcaaactcctgtgctcaagcaaacctcatgcctcagcctcccaaagtgctggagttacagacctgagccactgcgcctagcctaggctcttctttaaacctgtggttcccaaactttctcagtccatagatttgccaaaacacagcttacagccagtaaaacttgtgacagggggcctgggggcagaggacgtcgtgcttttacctctctaatacccaatttcaaccatttgctcattcaccctctactgcctccctgcctgcccccttgccaatcacaatcatcctttttactcttggaagagaagtcagaggacctgaattctggtcccacacctctgccacttaccttgcagtatgaccttgggcactgttttgccttcctgatcctctctgtcctcattcagtggtgctaataggctctccccctaccaagctcataggctggttgcaagatctgatgagattggggctaagtgccagggcctcccaaatctctgcagactcacgtagccagctgccacccggacatcacccataggctcttctgacttagcgagtccaaaaccaggcttgcggccctagccctgtataatctcttcccctactgcccatattagggcagtttaccagtttgactagatcaaaaataggcatcatctgtttactcctctccctccacctcccacatctcataatctggtccgctttacctctcatatctctgcagcctatccacttttctctctctttactaccaacacttacattcaggctaccatcatttgttttcttccattagtgcagcacccgcctaactaactagtctgcctatctgtaggtttgggccctccagttcattttctacacagcaaccagagatttttctaaaatgtaaattcatgtatgcacttctccacccaaacacagtaaacagtggccttgcatcgccctcgggatgcagtctaacctcctgcgccggcctcatggtgcctcgcccagtttggcccctgctggctgctctagatacatccctcaccctcgtgatgtacaaaagccattctgtaccactcacgcttcctgaccttgtgctttctcaaaccttctagacattggcccattgctccgaactctgcccagaatacctctctgtgccatcttttccacatccctttcatgaagctggctaatgtattactctgtatccttcagaattttggcaaacaaattagtcaataaacatgtattgagtgtctgtcatatactaagcattctgcttagcgtttccctgacagtttctgcagaaaatcttccctgagaccacctggagcccctcctgtgtgccccaagtgcacccttgcactgcagcctcaggctgaagatcagggatgctggagccagactgtgtagacataaatcctggctctgactcctaccagctgggtgattacaatcaagttacttaaactctctgcttcagtttcttcatcagtgaaaggatgagaataacagtacctatcatgtaggattgtggggcggattaagtaaatgcagtatatgtaaatcacttggaatatttcctggcacagggaagtatgccctaagtggtagctattattacaagtattttgggcctgcatgcttatctgtctctccctctaaactaactctcagtcttcacaaatagggactaatcttacttactttctccttttctccagtagggttgtcgttttcagccttgtattattgcatcgctatcacagaagtactgattctctcaagaccagagtataagttgtcaaaattcaagtgagcagtctgttttttttttagcgggggatgtaaatttagaaattgactgaatttaagtaaatttagaatttgcatcacacttgtgatggcagcatcatggtaatatggaaggaacataagtatggcgtcatgcaagcccaaggttaaatcccagctctgccacacgtgatctttgttcccttgggaaatgccttgccctgtgtgtgtgtgtccattttcatgatagctttattgtagggtcattctgaagattaatgagattgtttgtaaaagcctgcaacatgcgtatgtgctgagacagaactaacatgtaggcagtcacttgtttgtgggcaaagctgtggcctgagagccttggattcttaccaaaactgccatcagtttcttcagcctcagtttccccagctaaaagacttgcagtttctaggattcttctctaatagtctgccctattttagaagcttttggaggaagatttgttttgctggtgttgatgcttctcccatctctagttacttccctctcccgtggttcaagtttctccccttgctttggaagaaagaaactagcattttccaaatggtgaggcaattcccacccatgactggagacccgagtggaggcttcaggtttcggctctgagtcatgtcccgtgttattaaggcaagagaggttcatgttggcttcatagcagcctcttttatgactgtctccttttatcagcaaggggcagctcactgcctgtcaggggcagattagaaatgacatccgcatgcttatttggagggcttgcgacttgactgctgaaagagatggaggcatgtgcaaagatggtgatttagtagtgctcccaaggacagattaacatttaaaatgagtaagtggctggaagagggggaaacacacacacacaaccctgcggaaatggcaccttggcgctacacataccacctccttgtgtgtctttggagatgaagctgtttattttagcagcccctaaacaggcttatgctgctgcgaattgcagtctgttctaccgaatgcaccattcgctgaattaccatctaagtttttattctagccctctcttatggaatgaacaaaacaaaacctaccagagtatctctctcttttttttttttcttagctgtctcagattgcatgtggaatttgctgatgtagctatagatttttgtttcccttttaaaagtttcttgaatttatagggaaactataggccaagaagctaggtgaccttacattttaatgctactggtttgcgttagtctccagatatggcataaagaaaaatatcccatctatttgtttatatgctaatactatgaaaagtccataaaacatagactttttccttttttgaactatgaaagtgaacacagccttggaaacaaatttgcatgggtttctgtcctgtttctgttctgtttcctgttccccgtgagctttttggccttaggagagattcatctctttaagcctcagtttcccatttgaaaagtagaaatagtaatagtttttacctcttggagttcttgcgaggaaaaatgagaaatccgtgaaagtgcttagcacggtgactggcgcttagtaaggactcgagaaatttcactattgttaggattcggtttttgctgtcatctcttgccagtgtgaaagaactaatagagaaggcctgggactatggaatcacattccactcaagtctccaactgaaacccaatggtagtcatttggtatctgtctcaatttttccatctgtgaaatctgaaaatggtatttgttgtacatacccaacacagggcatgtacagcaggtaagattaatgcaggtgccctgctttgcacagtaaaaaatgctgcatgaatgctgagttgtcattgcttcacaaagaaggcagtcaccttcaggctcttcaaaggtgagagttgagtgaattgatttgtggaagactccctttaaatcttaactctcctgtcttgttcagatacagtccaacgtacatatagattttcactctgaagttttgtaaagtgagaaatatttacgacacttaaggaagttactggattcttggaacgtcccttaaatctctgttcatcatattcccatttgaagcgtacgtgatttgcatgcccctgttgtcttaaaatggcctaatgtcacagcagatccaggggttgtgtctttgtcacagggaagatgaatttattgatgaaaggatgagctaatcatcagtgttggccatcatgtcctgttgcggtggtgaagtgtgtctccagcttgaggcatttctcatagtggctcctctctctgggaacgccatcagccaacatcctgaatccatccacatacccatacgcaggtagaaatccgttacagctggctagacatgccacagattatcaaagccaaaaggaccttcaagagcaccggatcagggaaacaggggtgaggcacactgccaccctcccctcctgcagtcagggtgggcattgctagtgatttcagggctgtttcccactgagcttcgcctcggcttcacgacggttttttgtatcatactctgtactcactgcagtgggttgagttggcacttgggatgaaccctgtttgccttccctgatctcgtgcaggcttcctgtttccaagcgaagaagctgaggccaagaaaagttaaatgactcacctaaggacactagtaaattagtgtttgagctgggatctgatcccatcttcttagtactctgttccaccttggcagaggaacttatttgtagaatgtatatatcatagtttagaggagttccagtatctaatttgaatgcttcctgcactcacacaaggtctcttgaggggcaaaggaggcaaggggaagctgggtgccttctttagaatgggatatttgtaacctgttagttcagtccccatgtgctaaggaggttgggctgcaggtatgatctccacacgggccagctaacttccctctgttctttgtctagccatttttaaaacatgtctcattggtcagtggggcataattcagtttttccctaccactagagaaacaagtccacttatatatctttagtgcataatggtcagagtattatagatcagactccttcacttcctccaggacctttgatgagggaagatataaggcagggagaagcttgtgatgataatttttttctagaacttttacattgcttctccagagactgaatcctagccatccgatcatgagtggagttgacaacagccattttggagtttcaggcacccttcgaagttctttcagatggccagctctacctcatcacacacagatagccaaggaatcatctcgagtccttatctcaagatcacctttctatgtggcatcttggggacccataaaaggagtcagaagtgtattaatccatttagaagttgacactgtctgtatggagtaagatgggcagagaataaaggtgatgccgtcttctttttaaaacagaccaaaacttgagaagatagaggactgcccacactttctcactttcttgttttccataatcattctgcttattttatttccttttaaacactgagtacacatttatatttggcttccctgaatccattcagcagtaaatattccatgccacagagttgtaacaggctagataaggtgctattctgacaacagtcaacttcactgcatgctggtttctatggcacttctaaaactgtcagggcagaaacttcatcttcagaagccaatctctgtttcatctctgtgcatgttcaatgcagcaatgatgatgcctttcttggagatgagctatagtcgtatctcagatctacatttgaaaatttcactttcaaatcatgtggccatatggctaaaagtagaatgtcgcattgaacattgtcagagtcttgaagttctgaggaaagagaagaaagtggagtttggcattgctctcttgagtttgtcctttctaaatgacaatatagagaaactagaaggtgcagtgtgtacctgcctggttaaaagaagatcagatgatggagaaaagtatgaaaatggaaaaaatcaccaggggtacttctgacctaattagagaaacttaattttgctaagctccattcttgagcctccctatcactctaatatttaatgtcttcctttgttctccagacagctccgaaatctatacccacacaaacatggtagcatgaaaagagcatggactagggtttgagtcccagttctgccacccactagccttgaggagcttgttctgcctgagccagcttcctcatctaaaatgggggtaagaatccctgcctctcaatattattattattattattattattattattattattattattattattattatttgagacggagttttgctctgtgccccaggctgagtgcagtggcgtgatcttggctccctgcaacttctgcctccaaggttcaagtgattctcctgcctcagcctcccaagtacctggggttacaggtgtgcaccaccactcctggttaatttttgaatttttagtagaaacagggtttcgccatgatggccaggctgctgtcaaactcctggcctcaagtgattcgcccacctcagcctcccaaagtgctaggattacacgtgtgagccacagcgcctggccccgcttctcaatatttctgagaagtaaaggagttaatatacagaaggcccttggcactatcctgacacatagtaagtccccagtaacactagctgctcctctctggtaggtgggtaatgatagcagtagttattatccagactgcctcacgcaatgcctagtatgtagtaatcaatcaaaaataatatgatctaccgaaagctgtgatctaataagccaaaaaaaaaaaaaaaaagcctccccttacccctttctaatgtttccattagtgatactgatgtctcactgttgttctctctgagttgacttttctgtgcctttgtgcatgctcttatctcctctgcttggaatgtccttttcagcctgtcaaactccttcaaaatccagctcagatgttacattttctttaagcactcctgaccccaccccccaaatagacttagtccagccttcttctgggttcccacagcactcagtacagtttgaaaggtcctttataatagtcattattacatttttcaaaaataatttcatattcattaacctcattagattataagcacctcaattatgtagactgttttatcactgctgtcccagcacagcacctggcacagttagctgttcaagacatctctgttgagtgggtaaatgaatgagttccactccaggttcctgtgtttgtgacctccaggggcctcttctcttcccttccccttctcacgtaggctgatgccctggtcttccagctatgcactctacctgcctctcgatgctctaagccgatgtgtccatcatttggctgtttgcatattctgattcatgacattttcctgcacagtgctggctgacactctgtagcccatcatatctgacttctctggccagcctgtatgcctaccatcagctcgccctccaaggcacagtccttccccgtttcctgatgttttcacttctgccccagccatgcaaatctcagcacacacagctcattaaatagctttgaacctctcccttctttttttttcaatactgtttggcaaatgctttccaagagcctactaagggctgggcacagcgcctcatgcctgtaatcccagcactttgggaggccgaggcagttagatcacctgaggtcagaggttggagaccagcctggccaacatggtgaaaccacatctctactaaaaatacaaaaattagctgggtgtggtggcaggcacctgtaatctcagctacttgggaggctgaggcaggagagtcgcttgaacccggcactccagcctgggtgacaagagcaaaactccttctcaaaaaaaaaaaaaagagcctactaagcaaaaaaatgctgcacaaggtgcttcctagggtacaaagatgagcacagtacagctcttcctttcaaggaacgcacacaaggaagaggcacagatctgaatggctagttcaaggcaggccgtgggaggtaccacaacagaggtacaaatccagggtgtagggggttgaaggactgaaaaatcatatctgctcggggttctcagggaacattttgtgaggcacatcacgttgtagactttcaatatatgatgatagagactgaggagtgggcggtaccaacatgagcaaggcgaggagaccaggaagggaacacaggcctgtctgggctgggctggggtgagggggagtgagcagagagtatggccaacacaagtcgtttcttgtagggccctcacacaacgcgaagaccatacctctaaggtgctccattctgctgtctctgcccatcactcgccctgaaaccttacccaaaagtcacttcttccaggacgcccttacatttcacccaaccccaatcagcacctatcacttacaatttttttaacatgtgggcacactatacttactttctggccatttcctagaagtttgtgacttccaccgacctcttcagtggttaaaaccagggcttcccttacctccattttccttatttttctgccctaattcagtgcttagggtagtgttcttgccattaggcacttagtagggccagagttctcaacactgtaccaagttactcatttccatatcaaagatgaatcagacacgattcctatccctggggaatccgttttctagcaactggtaattatgagcaacttaacctctgtgtgctttggtttgtaattcatacagtgggatgaataatctcttctctgcccttttaaaatttcgtagtaactgctgaacacttcagagttctcgagcaggaagtcatgattatgagcaaatgagaaactaaagagaacgttctatttttaaactcgttggacatgagtccagtgctccatgactacctcgtgaacattaatgctattaccagattaccaatgaatttgctactaaatgaagctaggaattagtgttagtgatttgccaggcagtgcagggcctagcagtctgcaggccaaagagggttcaggttttgtcaggggcgcatgctgcatttcacacatccaacaccccccaggccaaagctctgataagtcacaggagtctcctttgtaaccctagacctctcagacttgctgtcctcatatccagtcctcccaagtagattcactcatttccacatcaaagatagaggcctcataggagccgagatgaaaagtagccttgtgttgctacaggctggccccctgggcaaataaagaagtgcattatctgtgtctaaatagtctctgaaggattctcggtggagattgatgaccatagtggtgagttctttgaatgtggaagagtggaaagcaggatctcaagggcttcccatcagtgacaggagcccaagttgtcagaaggaacggtggccataaagctaccaacagaattatgaaatggattgttgccatcagaagcatgtattgagcacgtgccttcttaggcccatgggctagtcacgcagaacaagtccccacaccgagttctcactcctgagagctcatagcccaaaccagatgtctgactggatgcaatcgttcacacctgtaatcccatcactttgggaggccaaggcgggaggatcacttgaacctaggagctcaaagaacagccgaggcaacatagtgagaccctgtctctacacacacaaaaaagttttaattagctgagtgtggtggcatgcacctgtagtcctagctatttgagaggctaaggtgggaggatcactggagcccagaaagtcgagactgcaatgagctgtcattatgccactgcactccagactggatgacagtaagaccctgtctcaaacaaacaaaacaaaaaaacagagatgtcttttttcctctcattgtctcattggctgcatagatgtgtactgagctagggccctaccttcacagagctcacagtccactctcatgaaataaaggctgcagacagagatagctggtggggactgaagtcagtatgaagatgatggggaggagaggaggtcatgttgcagagtggtttgtcaaggtgctctcagcaattttagaaaggagcagttgttagccttaaaatcaggaaagcctttgttatggacatagctgaaaaatgatgtgaacttgaaccataccccggaatcccaaggggggaaggcagtagggccctgagctgtcttggcagaagtgttcacagtgcccaggatgaggggcgagaggattggggttgggggatggtaaagatgttaaaaattgattgcacaactcaacatataaaagctgttagattgtacactttcagtggatgaattgtatagtatgtgaattatatctcagtaaagctgggttttttgtttttgtttttgtttttttaaaggaatctactagggaggactggatatgaggacagcaagtctgagaggtctagggttacaaaggagactcctgtgacttaattagggctttggcctggggagtgttggacgtgtgaaatgcagcatgccctctgacaaaacacctaagccagagggcatatgtacgcaagttgggtgcctgtgccattggtttcagagttgtggagaaaggggacctttctcccctgtgtttaacctgatttggaaggcagatttaagtatacagatgctcctcagcttacgataacattgcatcctgataaacccaccataaattgaaaatatcatgagttgaaaatgcgtggctgccaggcgtggtgtctcacacctgtaatcctagcactttgggaggccaaggtcaggagttcaagaccagcctggccaacatggagaactcttgtctctactaaaaatacaaaaattagctgggcgtggtggcacgtgcctgtaatcccagctactcaggaggctgaggcaggagaatcgcatgaaccagggaggcggaggttgcagtgtgccgagatcgcgcctttgcactccagcctgggggacaagagcaaaactccatctcaaaaaaaaaaaaaaagaaaagaaaatgcttgactgactgggacctgaggctcgttgccactaccagccttgcaggagaagtacagtttctactgcatgcctgtcactcttacctcatcataaagtcgatccatggtaggtcaggggccaactgtatcttacagagagattatttatggaggcccaaaccaaagagtgaaaaatgagtggaagcagataaatagcttggatttgtgtcccgtcagcttgttttttttttttttagctttttttatatgtggatgagatcatattggccctgattcgtcagataggaaaaaataggctttaagcttgcctcctggggcctctatagtccattaagaatgaagaacatgaaagatactttaaagggagatgtagacaaatcaaaaagatgaggtgattttcttttgctgttgttatagttgctattgttgtgtgtattatggccagactaggagtccattctttcctcccattcactgtccagcttttattcctaaacgttcatttgtttctaggacatggtccggcgaggagagatcatcgacaatgacaccgaggaggagttctacctccggcgcctggatgcggggctctttgttctccagcacatctgctacatcatggccgagatctgcaatgccaatgtcccccaggtaggagggtcttcccctggatgggcttatccatccctgcctccttcctcgccagctgcttaggtggactctcactcagggaaagaagggggtcacgctctccttgaattcctttactctacatcagccttttgtttcagggatggggtgaagtatatcatttcaaggtgatacattctggtgtgtcaggacaaatggttgtctttctttctctacccattttttcccttattagattcgccagagggttcaccagatcctaaacatgcgaggaagctccatcaaaattgtcaggcatatcatcaagggtgagttggatgctactcatgtctggggctccagaggattagatgatgcttactttctgagcctctgtcagtatccctggtatttgatgtggagcgttttctgcactgaaagcttaagttgttgtccatttcactgtgtgtccaggtcgtctttgtcagaatacggaagactagccttgttgttctctgcctcttaccctccagttccagaacttacacccataaacaagaggcacaaaggcttgaaacagttgttaaaattttttaaaaaagcaaaacaaaaaattcaattccaaactacacatagtggaaggaaattgctttcttagggaaaaaaagcaaggaaatgacaagaaatacaaacgtcctttcttatccacagttttgctttcagttacacacagtcaactgtccagaaatagataagtacagtacaataagatattttgagagaggccacattcatataacttttttatagtatattgttataattgttctgttttatttagttattgttgttaatctcttactgtgcctaatttataaattaacctttatcatagttgtgtagttatcataggtgtgtatctatagggaaaaacatagtgtacataggtttcagtactgtgtgcagtttcaggcatccatcgggggtcttggaacatccgtcgggatgcaggggactactgtaactggaattctgtagtgaattgaagcaatgtggagtggtggagagtatgcctgccttctgggcctagctctgcctcctctagctgctagcctgtcacagctaggagaaattttgcaaaggttacaggaggtactacagcatccagtctgtacctggcacacagcgggtgctcagtcagtgtgggtttccctcctcctcacccaccccatggagttccccaaatgctgctggatctttgactggacctgactcagctggagaggcctccagtcggtgagcaagcccccagttacaaggcggggcccctgttctgagctctgaatgcagccccaccgtcagccacctaggcactaactggagagcgctggctggtacgtgtggcagtggaggcccatgtgggaatttccagtactgacgatgccggagttcagggagtgtccagatggactgggtaactctagacaaatcagtgttcacctcgggccctcattctgcccatttctaagatgaaggactaggctagatttactcagagagcttacctttcagttgcttttagctcccattccaggtggcggatgaaatgtgaggataaacatagtctacacagtgaagtgaagcacggttaagagcgtgggctctagggtcagaggcttgtggatccaaatcttggctctgttgtttactctgttacctcaagcaagataccagttgctctgtgacctcctagaaagggcaaggggattgaatgaggtgacacaagttaacagtgaacgttagtgtgagtgttacaaaataccaggaagatcattgtcattattattttaagtgaggcatggccaaaatcctgtgggaagccttgtgagagaggtggcattgagctggtctgagaggctaggacagagacagtccagaaagaaacagcagtgtgagtgaaggcataggggctggaaatctcgtgtctgctcagccctccccatcagggaatggtaaatccattgcacccattttgtagatggagagtatgaggcattggaatctgttgttttctcctcagagaaaaagagagtaaaggggtctgatggacacagccccactcatgccttccggggtgacaccctgggggcttcttctcattctcagtgtcagattcgcgtgaattactgctcagagcctcattttgcctcctccctaaggtgtagctgtggtgatttgcaactccagcctttaaatggcatttacttctaatgcccacatgttcaattagaacttcttattaccctcagctctactatcttgcattgagccttctccctgcacctccatccttgtaatcaaaacagtgatcttccaagaaaggaaaagtatttttaatgggtgctgacatgtagtagtagtagttggatgtttttctttctcaaaccctgccacacacaccctaagtgattcacaattttccattgttgtgagccctagcctctgtctccctcggatcctggtttatttccctagtgccttttaaggtgctgaccccatactggatactgagtggatgattgttgagtgagtgcctgggcaagcgagcaggtgagcgaaccagtgaagggtctgcacagacgccatcttcattcccacccctctgtttttctcccccactgctttctgcccaccctcacctcccccacctccatgcagaccctcgcagccatccttccaggcctgggctcagcccttcatttctctccccatcacccttcatagccagctccttagtccatcccacctcttctgtctccgaactcaaccttgaatccatccacttctctgcatccattattcccatgatagcaccctttttctttccatccgagcccttatcacaacctatgattgtttttatttatgtgtttgtttactccttttgtctgtctcatacattagaatataagctccatgacggacattgtctgccttgttcactgtgtctcctcagcacccagagcaatgccaagcaaataatgggaaccagtaacaatttcagacattgtggaatgaaaccctacccttgtatgaatttaacgtagcaaacattgactgtgactctcctcgggactagctgggcacagtgctaagtgctgtgctatggaggtgtcacacggcagctgccctcatggagtttacagccttccagggacatagagtataaatgattgaccataatccaagcccagtgaaatgcacgctccaggaactactcagctggccctgctcagtgccaggctctgtgtccagtcctagagatactaaaggaataagcgagatccctatccttgaggcgttcacagtctagggggagaggctcaaaactaattagaacgtgctaagcacccgtcaagttgtgaacagtgtgctgagggagggagtggcacggaggcagttatgtaagcagggagggagccacttctcctcctcaggactaggactggtacccaaaccaggcagagggagcagaggcctggaggaggacagggcaggatgcagtggccttggggaggactatagccccttcaagggaggccaagaagaggtgcaggaggctgtagtgttgggtggggtgtggctgggcagggctcctgagttctcctaggtgcacagtgagtttggggtacaaggggtgactgcatcccttgattggccagcagacagcggacattctcattagtccctggggaatcgtttgggaaatttgaggtcatcagtgtggaggtgatatttagagcctgggaattaaacgccattgctcaggttgaagaggccccaaacatcacgctggcaattaaaagagttctctctagatggaaggttgtcataaagagttctcagccctcccgctggtgtgcccctgtcctgcctcacccacggcaggggaagccagtctgcagcagggtgtggagcctgtgcagtgtggcctgcctctgggagcaccccctgaacagggtgctgcaaggaccctgaggagccctcacttgggtggagagggtggtgctgaggttgacaaggttgagactcccatggaggtggaaggggtgggaggctgggctcttctgggacccccgtccaaaagcccatctggttctccttttcataccacgccccccccaccccacccttccttcaatcaaaagcccaagaaaacaaagcctcataaagaaaaccagctcatcagtctgtcctctttgattttaattttgtttttcagtttgggttgcttcctttttttctttaacatactaattagatgcaagcttttttctttgattttatggcctacatatttcctaagttttgctggcaggatgacagctgatgtatcccttgaggtctcaggaaaacgctgatgaggcaagcccagcgggggacttttcccgttatttttcagcccccactctcacaattttctccctcctctattgggggtgccaagagcgcagggaataattgatggctcattacagcccctgtctctgcacactgcttactcagtgctcccgacgtccagccttccccagaaccagcagcagctctggcctgaggactgtgggccctcctagggaaccgtggtctgaggactgagacggccacaaagagaagggcagatggagccatgtgctccatgagaacagcagcagacttactgccatttatttctgtggtgctcggcaccctgactggcagagaggaggagtcagttactgctgactggggtgcgtgctgaggtggtgctgtaggcttcttctattccagaaatccaggaccatggtaggtagagtagtcacttaccgagctcctacctcctctgggtcaggcctttggggtacagtgtcattacctctggtcctcacaacaggcctagaaagtggggtaacaaggaaactgagactcactgagcttagtgggggtacctgggtctctggtgatgtaaactggatccagactcagaaggagctatgcacagcggtaaggaatgtgccaactgctgattggcccatatgctcctatgggcttttaggagagaagaaaaatgcagggcactcacctttagagagcaccaatttgacatcacagggtgctaggcaggcttctaagataagtgagacactcaggagaccctgtccccaacaggcatacgtccctcacaagtgaggtgactgaccatagcgcaaagcagaatggagccagtgctgggatgcagaggtacaaggggaatgaagacggcacagttaactcacagttaatccggctggacatgaaaaggagcccaaagatccagggaagctgtacggaaggcatggcttcttttttattttttattattgtagtaataatttatcgttttgactattactaccatcactaccatctatccacaggcctttttttcatcttgcaaaactggaattgcccgttcctccctccccccagcccctggcagccactattctgcattctgtctctgtggctgcctgcatgggaagggtttccgcaggcagctacgcatgggcattgttgagcagtcatcaccttggctgtggcgtaggagctgtgacccgagaatgcttcgaaatacaaatatttgtgccaagggttgcagtggaagccactggccagtcttatcgatgttttagtctcctggtgaaagttgttggaggaccacacagatgcccaggagcagccatggctactgcacagtggctggtttgcagagaaaatcttagaggattactgactcaaaactctctcactgctgggcgaaaagaatgagccagaaacttaaatgcttttagaatttggcccatggccctttgatttgcgagtattctttatggtttaaaatctcctcctagtagctcataaacatgtatttccatattgatttggggctcttggtaacccaatttgtgtgattttaaagctgcagaggctgataggatttatctttggatgacatgttggcatgtgcgtggcttgcgcctggtcatggatacggtgtcccacagggtatttggaggcaggaaaggatcatggagagaggcctgtatgttagccctgtagccagcggccttgacaaggctcagaggcatcttaaggacacctcaagagcttttcagcaaagatgtcacatttgccttaggattgctgcccccgggcctcacacccagttcacccaagagggctctcgggaagcgctgcccggggtagtgtggtggtggtatgcaggggtcggggggaaccactcttggagaaccaactgtgctaagaccatggagcctgcagtgagttgcccaggttcacaagcaagctctgtcgctttctagtgtctgacctcaggcagctcttcccctctccaagccatagctcctgcatctgtaagatggggagaacctgtctcagaaggctgctgtgagaatgaggtgaagtgctgtatgtacagtgctcgcatggtggctggcacctagaagaaagtgcctgttacatgttagctgtctttattgttataattagtgtccaagctcacccaggaacagagatgctcagaccaacataaattctggatctccatgtaactctgggcaagttagtaggtaacatatttaagtcttggtttcctcctctgtaaaaaacacaaagaaaaaaacacctaaaataaatattgcctctctcaggaagcctccaaagttaaaatgcagttgggtgcctgggaccaagttacatactcagtaaatggaagttccttccttccttgacctaatcctttcgcctggagttagcagcagcttggactgagatgccaccaggaaaagcagggaccagcacacaggctcgacttccccggggccttgtgggggtgggtggttgtcagtgggtgcttttccaactgtgtaaaacatccatgggactctgagaacatgaccattggcattgtaagcaagagcaagggtctttctctgtaagtgggtttcatttgaatggcatccctgatgaaatgagaacctactgcctagcaaaatattctacttctggagaagcgcaactttcaaccttccaagttcattgttgttgtcaaggaatctctgttagacctgaaggattttcctttctcagtttctattttgtggttatatgtacatcttcaagggttttcaatgtgaaaatattgggcattcctcctctctcctccctcttcctcctgcatttttaaaaaggtgaacatgtaaggcttaaggttcatggatctgaaccaggcttgtgaatactcatccaggtctccgccctggaagacgacttttccccatccaccagccccagtgccccctccctctccctctcaacataaacagaacagcttgtattccatgtctgaatagtaaacctgctgtctaaagtttgctttaatatttatgcgttcagcactgctgcctgtttctgagttccatcaaagcctttattataagagcatttgaaaatgtgggggaagtagagaaaggagttgacgtgtatgccgtctttctcactctccactgacttagcctcttccctctctcccctcatccttttctccctctcccctcatcctgcagtctcttttcctcttacatacacatgcacacacgcacacacgcacacacacatgcagcagagagaactctttcccaagacctctgggaggactctgttcaatatttaaactgctgcagcagctgtaataaccagaggtagctggcaccaccaagatttgctctaaataggactctgccatagaaacaaagaatgagcaagggcaaagggtgaggttgaggtgcctgagggtgcagcttccccgggcagtggatgagcactaggccagtggatgagtactaggccgggtcgtcggacctggttctgggcctggctccgtggccggctcactgtgggaccctggccatccacgtgccccctcagggctgcaataaatttctgagaacccttccaactctgatatttggtaacttggcataagagagggtgaccccagccagtccacccacatctgtcctggccaccgaggccactgtaccataagacattcctgttttggaatgctcacagagcagagttttttttcccaaagactaggggccaggcagggtagcctgttgcttaggtaacaggatgctgctgtgaggaccggccccctcccagtggttttttaggggccttttttttttttactatccacacatttcaaggtttgaattccggctcctctacatcctagacttgggcgggttgcttcagttctctgatagcctctgtttccccctgggtaagtagggatggtgttctttaccttgtgagattgatgcaaaggttacatgtgagacaacctagaaaatgcaggcacatagcagtgcacagcacatgttagttccactccgctctgtatgggacaggccctcttccaggggacactaagccattcactgcctgtgggccagtcggatatcccctttccagagaatgggtgatgtgactgtttgcttcttagcacagttggagtgacacaggagacttgcgcataggatgggtgctctgtgtaccgtcggcatatgtaagcgaggcctcggcacaggtgattcggcaaagggattgatgcaggtgtgggttccctctgcttcgtacatccctagaaagaactcagggaagccggctttactgttggaaaatcactgccccacagcatcggactgtttctccacttccctctctcctgggtctgagaagacattaggagagcaaagtgttagctcaatccattaagactcctgcttccagaccatgcctccggggatattagatgccataatggtcatttctctctctcctggggcagcaactatatcattcacatgtgagtaagagataccacttacacacagccccagagccttctgccaaagctcagttcctgtctccatcaccctggccctctctctaaggggccttaataggaggcatcacaaccacttgctgttggaggtgatggatgggcctaacagaagaggatttctgggggtagacacacagctggcacatgcctgaatcccacatcccattttctggcacacgaccaaagtaataaagaggaacggggcaaaataaagaggtagcaggagcaaaattacttccccagcattggcaggggtggggctgacaggggaggggtgagaggtcacatgctttgtctccccagtctttgtctggtttggatcagcaggtgttttattatgcaaaagcctcttactagagagttctctccattttctttctcaagccaggccccagtaagggaccagggggcagaagtgcaggcagccatcctagtcacccactgcaggagatccttcagcacgacactctgctggggggccctcggccaggcttagctgggaggaaggcgaaagcccctgccttcatgcagctctctgtctagggagagaggggctgggtggaggatggtctagcagtcaggcccacatgtgctggaggcagtggcctggggccgggtgtgggagtgagaggtgaccaggcaggctttcacagagaagacatctcaggaggggacccggaggaggtgtgggacttccccagtgccattactggcctgagcaaaggaggctgagggagggaactaatgttccctggacgtttgttatttgaacattttcagaggggaccacccaagggcacagttgtgagtcagagctaggatttgattgccttttcctctctggctgtgggcaggggacagtcagagggcagtgaagggttggaccaccccatcctcccccttcccctcccaccagatcccctacacttgctctaggagccaccgcaggaagtccagagtcaccaaatcatccctcgccatctcctaaaaaaaaaaaaaaacagggtgaccatgttattttgggggacgaggacactaaaaaaaaagaaatggcgtcttaaggatcactgtgctgggacaacaggggagacaagaacacaagcctgcccaccatgacactctctgatggcatcctctgctgatctgttgccagaactgtgcccagagcctcaccctcctcaggaatatttcctttctcttcctggtctcactgaaacctggtgctcctacacccctcctgccactggagacataggaggggtcttccatgctccagtacttctagactattctctctccctcccttccccgaatacacccagctgtcgaagtttgtgtcgggggactgcaccccccgacagcccctccctgttgttggcaccagcacctgtgcccccagtccttgcggggattctgggctcactgtcagcctccccaatgctcttgtcatatttcttggtgattgcaacatccatatctctttctcacaccccatttccggtctatctgtaaatcctattggagccaccctcagaaaacatcaagaagctgaagacgtcgcctcacctccaccgctacctgcccaatccaggccactgtcacgtcgcatctcctttccctgcctttgcttcccccatggtgtcccccacacagcattgagagggatctggcaaaagtcaaatcacgtcattcctttctgctcaggacccaccgcacagaaaggccacagcccttaccgtggtgcacagacccacaccatctgggtatggcccctcccgtggctccaggctgtggccacgctgacctcttcgctgaccctcagataaaccaaagaagtgcctccccttagatcctctgccctggctgccctgccactcgctcctagacctttccacactcatctccttctgatctttaagcagatactccctgctgacagccacctgtgtattttgttcactttttggtttgtgaccctcactagaaagtaggctccacacaagcagaaatttgcatctgtttctatcactgctttattcccattcccaaaaaaaggttctcaaactggagcatacatcagcatcacctggagactcaataaatcccagatcactgggccccacccgtttcctgttaagtgggtctagggtggtcccaagaatttgtgtttctagtaagtttccatgcagtgctgctgctgctgctgctgctcgggtccacactcagaaccactcacccagagcagtgcctgcccagctggtgtctgtcttagtctgttcgtgctgctgtaacaaaatccctgagactgggtaatttatgaagaacagaaatgtacttcctcacaattctggaggcggggggtccaagagcactgccccaacctttggtgtctgctgagggccgtcctattgcatcctcacattgcagaagggggaagggcaaagggtcttgagagttccctgcagtccttttgcaagggtctaatccccctagattagacctaatctagacctaatctaatcttataattagatggtaagaacctaatcaccccataaaggccttcgatgcgttgaggatgaggtttcagcatgagttttggaggggacacaaacattcagaccttagtagcatccacgccatgtgtgttgagtgaataaatacatgagggcggaagtgaagggtgtggctaggaggggaatccaagcatggaaaggtaagttgggacctttccactgaggcctcaaaggcaagaccccaaggaatttggctacagtgggggcattagggcgacttgcacctctgtgggagctggggttctgggaaaggtatgaagcgacgcagccacggtggatgccatgcctgggatccactcctgactctatctttgtccccctagagtatgcagagaacatcggggacggccggagcccggagttccgggagaacgagcaaaagcgcatcctgggcttgctggagaacttctagaggcaccttggccctgcgcatcatggactctctcagcttccctcccaggatcagtttctacacaactctgtgtggcttttggacaaattaaagctagttttggtatccccgggccagttttctttgtagttaagcttcgcctgctgaccctccctgccccctccccacagcagctacttcaggactcccccagggaaggcacatgggcagcctcactccgcctgcaagaaagctgaggctcagagggtgtagcagtgacaacttcgccactgtggctacgcaggtggtgctgctgtgaggctggactggggacccgcctagagtctagatgtgggacccaaggccctggcctcatgctccagttccctggggaggccagccacacagcacagccctcagagcatgcagagccctgccgcgtgtcagaccactcgggtgggggctgcatggagaattaccagatcccaacgtgggccccaccgcaaaaatagcatccaatctctcagtgaggccctggcatttgggctgtttaaagctcccagtggttccgtgcatcagggtgagagccactgctttagagtggacaggtttgggtccatctccccactgcatcattaccagctgtacattttgttttggtttgggttttgttttttttttttgagacggagtctccctctgtcgcccaggctggagtgcagtggcgcaatctcgactcactgcaagctccatgtcctaggttcacgccattcttccgcctcagcctcccgagtagctaggactacaggcgcccgccaccatgcccggctaatttttttgtatttttagtagagacgagatttcaccgtgttagccaggatggtctcgatctcctgacctcatgatccacctgcctcggcctcccaaagtactgggattacaggcgtgggccactgcacctggccggttttgttttgtttttctttttaagacacagggtcttactttgtggcccaggctggagtgcagtggtgcaaccacagctcaccgcagccttgacttcctgggctcaggcgatcctcccacctcagcctcctgggtagctgagagggaggtgccaccacatctggctgatttagctgtacatttggataagtgactttcacctttctgaatctcacttcttaaactgcacagtggggccaataatacccatttgctgctgaggatggcatgctcagcaagcctgcagcgcagtgatgaaggcacagtcgtggcttggtagctgctgcttcctttggttcttcccacacacatttgtgacttcagaattgtgatttcaggccagatgtgatggctctcgcctgtaatcccagcactttgggaggccaaggcggggaggatctttgagctcaggagttcgagaccagcctgggcaacatggtgaaaccccatctctacaaaaaatagaaaaattagccaggcatggtggcacatacctatgatctcgtctacatgggaggctgaggtaggaggattgcttgagcccaggaggtcaaggctgcagtgagctatgatcattcctctgtactacagcctgggcaacagagcaagaccctgtctcaaaaaataaaaaagaactgtgattctactcattcgacataggtgatgagaaggttggtttccccctcagaagtcagcagtgctttagcatgtttttaatcaatcctcaaagaacagagtccccatgagtgaggaggcagaagagtggccagatgaagaaagcagcatttcattccaatgcattgtgcagcccagggtcacagacaggctgctggggatgctacacgcctcgcactgtgtccctgcccctcttgctgctccctagaccctgagggacagggccccaagcggccactgccatcaggccagagttgacatgctgggtgaaacctgtttgccatcccaggaagccaccgagaggtccctgaagaagatggcacctgctctgtgtccagccttgggctggtgacggaacagagagtaaggcaggccctgcctgctggtgctcacttgcagcctggcgggagaacaatgcataactgtaagcgtccccacagagaggggcaggagagcgcgacagggcctgtcacaggatcagatggcggtgccgtcactttgggtctaattcttccttgacttttctgtaactgtagtagctggcacatatcgaatgcccagtggcattgttatccccgatttatgcaagctgaggctgagggctcagagagggtaagtagctgcacaaggccctgtggccaacaagcatcagaacgcacattctagccaggcctgtccgacggcgcagttcacaccctctcccgctgagctcctctacctggaagggtcacaccgtaccggctgacgccgtgctccgatcctttcatctgttgtgtggtttaatgaattcacaaaaaatagagcatgtccaggtgtaacttagagaagcagacttctagagctaagatcggtactttagacatcatcagtccttcaccttgattttctttttcaattttaattttaaccaggtaatgcttgcaaacggtataggagttcaaaatttaacaaaaagcgaggcagtgaagagtccacccactcctctcccatcgcctaggacttcctgcccctggaggcagctgctgccatctgattctcctccagagttctgtccagcattttgccagccgtgtttggaagcccaggctacccaccagctcccagaggccagcataggaaggaaaggccggggcggctcaggcactccatggttgccgcaccttgccctgcttcgcatgtggcagcctcctgaattctgtccctttgctaaaagcaagttggaactcttctcttgacaactgaggaagcggtccccttttccattagttttgtgtgcggagggttaggggcaatgtgaggtgtagtcccttcgggtgcagcaggggagtacggttccagggcccgagggaccaaggagacagcgtaaggagaaagcagccaccaccactccctgatttcaacgacccaaggccccgcaaagcttttcagggcgaggtagagctcctcattgctcaccctgggctcttggggcgtggtcccagctttcaggcagctcgctgtctgcctaaaaaaccctctgactcacaaagcagcatctctcctctgggggagcttcttgggcttccaggaaaggctgcccttggcctgtggctccgaacctgacttctttgcccactgaaagggctcagtctaaatttgccccttcaaacaaagcttcttcatgttcatcctcatgtccatagctgagtgggaccagaccatagcatccagagaggcagtattccttttccaacccaaacatggcaatcggattgccttttagcaatattcgccagggtttcttcacaggggaaataggattccaccctcattttccatggcggcttgctgctccgtttgtggtggtcgcacgcctggaatcagcagcagcaagatgggccgtctctaattcacagagatttgcatgcaggctgcgtgccttccttatctagggagacgcattgtcagggccgctggaaggcatccttcagtcacccccacggtagcaccagtgcacaggtggcatcttctgccattactgagggcgtcaatttagtgtcaacagggagacgagactcgctttcctaaaggcaaggcttcttgattagatttccttacccaacagtagaggtaaaagcagacccacatttttcaatctgtcttgctctttggcacacatggaaagtggctggtagcacagcggtgggccttcgttatctgtgctggggaaaatggcaggcgtttctcagtcaccttcttggttaggtaacacgtgcccttggtgtaaacctcagagggtgcgtaagggcacacagtgcacgcatctccctgccaggtgtgtctcctggccgcccagcacccctcctcagaagccaccacggctcatgagcggaagtaccctttccctttcagagagactcctatgtgttttcaagtgaataaaaatatttttaacacaaatggtggcatcgtgtcctgtcgtgcaccttgcttctcattccccgtcaccacacacagctgcccccactcctttaataggctcactgcatcgcagagctgtaccatgatgttgttaattgtgttaatggacattcagactgtttccgatctttggctattacgatgctgcagtgatcatccttgtgtagggcgtcatttcacacacgtgtgagtttaaactcccaaggagcattgccaagtcaaagacagtgtgcctttttcattgtgatatatattgccacactgcccttcttttgtcaactgcgtgcacgagtgtcctctgcccacacgcaccctcaccagcgcgctgttagctcagtgcttcgcctcggtgggtgaacagtgtggcctgcttgttgctttaatctgcatttctcctataagtgaggtcatttagtgcgctagaatcgaattatgcgtgcatcatattagctaatattcattgagctcttgactcattgagctaagtactttcttcagattagctcgtttaaccctcgttcctgaagtgtaggtacttccttttgttgttgttgcccaggctggtcccaaactcctgggctcaaggagtcctcctgcctcagcctcctaaggtgctgggattgcaggcgtgagcacccagcctgacgtgtaggtacttgcctcatcaagtccatttcacagatgaggacaccagactgagggggtcagtggtttagagtgacagctgggaatggaacccaagcagacccctgctcctaatctcagggccaccctgttttccagctggttgctagagagggcctggtgaggctggagaaggtggcgcagaatacactgggagcagaagccccagcaaggcagcccttcccccaaccccatgactgaagcccgtgcggctctgcagaggcccagcgcccttcagcctgtccctgccacatctcggtgcctggctgtcatcctcacctgcatggaggccccagcccaggtttcctggctagggatgggcagtcacacggatgtggccctggctgctctcccatgggaaagggaggaaatctgagaaacatctggaagccggggctttccatctgcagcagtgaggagagccactgtttggcactgctgcagtgaggattgttgcctgtccccccaccccatccacccacccctgcctgcacacagagcccaggttccttctcgtccagatcatcccaccagtctgctctcctcaccccatgttgtgcctccttccatacacctcccaggaagcacttgctgagcatctactgtgtgccaggcccaggctgggtgctgaggggtacaccgaagtttgagatgcggtttgagctctcagcgtagtcacacagggcatcactgtagagtgacagggggcttcatagaggtgagcaaaggctgtaggacagaggagggccccatgcctgggggaccacgtaccctgtgtcttgagcaactttcaccagagtcttaatgatggccgtgagcctcgaaagctagaggtggaaagtcttttgaggcagagggaactgcccaggcagagggctagggcacaataagacacagggctctggggactttggggctttcagctgcctcattggaggccccaactaccttgacgttggcacggcatgggggttcaatgagctcccggccatggcagaagctgacaggctctggggttgtgctggtccagagtcacagagcttgttcccggacaagtcctgtgtctacttcccctaggctctttcagtccctgaatgagggggaagcagattccactgcagggtgacaagcagggccatccgggcagcaccgaggagccgtaggaagtccacagcccctggggagcagctggggaaaagccaccaggggactgactgacagaggccagggctagagaaaaggctggaaaaggctccaatctgcctgcagctcctggagcctgcttgagccagccccatccaggaaacccccaggagtgcaggggtgggcacctgccctcagcccagctgctgtgagccacgagcatgaccctcacactcagtctcagttcttcttcactcaatgacagcgagtgtccagcctggggagtcccacgtagaccagtacctgtggctgggtcacggtacccagccgatcctccaccactcatggctccatcagttactaaacacccctcataagccacataggggaacaaaacagacgttgtccctggcctccgggagcgtgcatcctcaagcgacagaccaaaagacaaacatgcaaacagttacatcaagtgacaactgagtgttatgaaggagcaaccaaggtgcagcgggatgcaacaaggaacgggggacctcaggctgagtggcctggaaagccctctttgatgagggccttagagcttgagctaatctccgaatgacgtcaaggagtcaggcagccaaagagccggggaatgagggggcctatgcagaggcacaagtgcaaaggtcctgagctgaggcagagcatcgtcctctagaaaagagtccaaagaggccactgtggctggacccaagagtgaggcagaggacggatcttacagggccttgagggcttcaggggagttttgagcctggaagggacatgatttgattttggaaagatgcctgtggctgctctatagaggacactgtggagaccagcgtggaagcagagatccaagaagtgtctggtgcacgctggaccaggaggagacagacactggttcttcagaccaggaatgggcatgggttggagataggggatttgggatgtattgaggcagagccaaccagtcactgcagagaggggcccctggctggccctgggagccttcccccagcacagagggctgggagcaacttcactggccccgcaggagtggggtggagccagcagagagagctgctcagtatataaatatctttaatgaataaatagaagtgcttttagggctggcggagtcgtatcatttccacctgccgtaaaatttcattagaagcaggcgctgcaggggagaggaatggctgcaataaatctgcccgcccaccctcagccctgcctccactctgagtcggctcagccccactcgctggagagtccagacccagacccttctccccaggccttcctggggcccaggagagcctgggccttccctgccccactcccacattgaacaggcaagaggcggcagagagctgtggcttgtcactgaaaaccaggggcctcactcccctcagctgggaaatgggcatgacagtttctgcccccacctaatgcagatgagtttcaggggaagcagtgttcaacacagggattcctggaacagcagagctggggcaaagcataccttgcaggtatccagttttacaaatgagcagaggccccaagagagtagatgactgtcctcggccaggcacagtggctcacgcctgtaatcccaacactttgggagacaggtggatcgcctgaggtcaggagttcaagaccagcctagccaacatagcgaaacgccatctctactaaaaatacaaaaattagccgggcatggtggcatatgcctgtaattccagttactcgggacgctgaggcaggagaatcacttgaacccaggaggcagaggttgcagtgagctgagattgcacaattgcactccagcctgggtgatagactgagactctgtctcaaaaaaaaaaaaaaaaaaaaaaagagtaggtgactgtcctaaggtcacacagggtctgcaggtctggcactcagaaactaccaaagtgacagctccagtctttagcattaatcaaatgcttggctctatactaagcatttggcatgcaccatctcactgagtcttattactagcccattttgcagataagaacactgaggctcagagagaactaggacccacaccttcccatcagttagtgacagacacagatgagtattcaggtctctgccctgccacagaagcctttttctgtttttttcaagtatggcggggctgggattatgttttcctggacatacaaattgtcaaagtgagagtctttggaaggacttggggtagaaagttcactgagtgctggccaggcgtagtggctcaaacctgtaatcctagcactttgggaggctgaggcaggtggataacttcaggtcagaagtccaaaaccaacctggccaacatggtgaaaccctgtcgctactaaaaatacaaaattagctgggcgtggtggtgggcgcctgtaatcccagctactcgggaggctgaggcaggagaatcccttgaacctgggagacggaggttgcagtaagccgagatcgcgccattgcagtccagcctagaccccatctcaaaaaaaaaaaaaaaaaagctgaccaagtgcctactgtgtgccaggtagtctctgaaccgaatgaaggatgctgtccctagcacttcattgcatccctgtagcttcttccaaggtagccatgctcacttccatcttacggataagaaaaggaagcgcagagaaatcaagggatttgcccaaggtcgcacagctttgcctctgaccttggccatggctgtcagcactcagaagaattggagacccatagacccctccctcggccccatggctacctcccccagcccatgagtgtgaggccaggaacactggccaaatggacaggcccagctggcaacatgccagggcccatggttatcacttaagctcattaagcagccgtgacaggacgtggcctgggccagctgtctttcctccccaccccactccagccctcctgggaataggacctgatgacaggcactggctttcagcagctgcaagcagaagtctctctgtcatgggggaagatccaaagatacacggaccgaacttccccaggctggcctctgggccccacctgctgcctgacctcctccgggctgggcacgtggacccgtgtggtgagtgagcacaggacgtggacgctggagccaggctgcctgggctcaaatcccagccctgctgctccccagctgtgtgagttgcttcactccctgagcctcagtctcctcatctgtgatatggggggacccctcgctttggagacctgccacaagctgatgcacgcaaagagcttgatcaactataaagtgctgatccaggctcatgtcgtcattactgatattcctgaaataccgtaagatgagactagactgttccccactggactacaacgtgattcgtcattacttataccagaacaactgaacaaacctgtaaaacatcaatcatcagcaaccacccaaggcaaagtcccttaggagcaaagagtgagcagtatgcctatatacacaacaagtgctctttaaaccaaagtgctgtgggcctgagccgctagtggattccagccacggcttccagcccccatggatgctccctcatctgtcggctcacaaggccacccacctccgtttctactccccggccccgctacttcccatttctccttggccaattctgttccttgctcaggactagctctgggctggatgcagccctctctgggaaacaggagcacaagtcctgccctggcgagggagacagatgcagacacaacccgccatcagccaggtcatgatgagtacaggccctgctgcctgaggacggggctggttttcatccgtttctgcacttggtgcccagcacagggcatgccaccctggaggtgtgcctccaacacgcctgcagcaggtcgcttctgagcacttagcatgtgagccggccctgggcagggctatggggatttcacagcaaacgaggcagaacgctcccagccctgctgcctttgaggagcaggagacccagagtaaacaggcaggcagacacacagccaggcagcttgaaaataacagagtgactggaagggagggtggccactcgggctggacagtcagggaaggtcctcgaaggagacgatgtcagattgagagtggactgacgcacgcaccagccgccgggggaagctgggaataatattctaggcagaggaaatagtgaggcaaagcctcgagtgtgcctcacatattccaggagcagccagatgggtgtgtgagtgaggggaagacgagggggctcaaagcagaggtgggatccttgagacagctcagtcacctcacctggccagagatgaaggccactcctgaattcattcacccacctctcccatcagcctttcgtctagccattcatccatccagcatgtactggtcccctctcggggcagctcctccctggtttggaggatttgagagtgactgaactgacccctgctctctggagcagctcatggtctcatgggagagaccttcatgctaagagacgatcccaacccagtgacgagcacacgcaaccggggacacagagtcaggagggaggaagagcgggaggtgagaggacggaggggtcagcgcagcccggctccacctcgggacagtgggtctgcaatgtcatcctcccagacaaaggacagtacattattagtgttattaattatcattaatctatttaaatggtaattacaattaagaacacagtgacaaaaatggcaccttggatttaaatgcctcttctctggcaccggagtgagtgattttttcctgagctcagccccacaccctgtcacagcacagcacatttagcaggtgctcggccaacctttaagttcaaattcacagctcaggcatcacaaggcccaactcccctgtcttacagatgggcaaactgaggccccagaaggggaagggacaggaaccaggtcacccgcaagtctatggtgaaggtggagtgaagccaagaaacccgattcccaaatgcctcccaactcactccatctctagctgcctttatttttttccaggaaaaaacagctgtcagaggcagccaccctgttaccgattaaacaaggcaaattctatcggaacagaatcggaggcactccggacacctaattacacagtctggaagagaaacacaggcagggaaatagaaatatgaacaaacagcaccgccagacaacggggcgccctccccaccaccagagctgccacccctccccctcaagcctctgcgacaagatgtgtctcccagtcctcaaataagatccccgctccccaggtggaggctcacacacagacctcccctcttccccacagcactgatccagggctcccagagatgaatggggaggcgtggaagtcatttcaggtgtcatttcaggttgacagccagggcagcccagctggggcccagcgagattgggcagagctgggcttgagcccacacctgctgaccctggagacggggctctgcctggggtgcctcctgtgggtgctgcctctcttctggccagcacacctggaggtctgtccccaggagggttagtcccatccagtagcatcacgggcaggaagctggacttggctgtccctgcctgctgcgagattctgctattgtatctcaggaggatgcaagcaggtgagggcagaggccctgtctgattccatttccgtgttccccacattggccggcaccagggcagacaggaaggaatgtgccagtaatgacgctgggctctagggagacagaaatgagcaaaacagacaaagatctctgctttcaaagaactcatgaagaggagatggacactaaacaacctaaccaaccaaccaaagggagggaatccaatgatacgatttctgataggaataaatggtggggtcagacgcggtgcttcatgtctgtaatcccagcactgggaagccagggcgggcagatagcttgagcccaggagttcaagaccagcatgggcaacaaagtgagacctcatctctacaaaaatttaaaaatcagccaggcatggtggtgcatgcctgtggtcccagctactcaggaggctgaggcaggaggattgcttgagccaaggagttcgaggctgtagtgagccatgatggcaccactgtactccagcctgggcaagagagtaagaccctgtctcttacaaaaaataataaataaataaatgataggaggccaggcgtggcgattcacgcctgtaatcccagcactttgggaggccgaggtggatcacctgaggtcgggagttcgagaccagcctagccaacatagtgaaaccccatctctactaaaaatacaaacttagccgggcatggtggcgtgtgcctgtaatcccagctactcaggagtctgaggcaggagaattgcttgaacccaggaggtggaggttgcagtaagctgagatcacgccattgcactctagcctgggcaaaaaggagcaaaactctgccttaaaaataaataaataaataaataaataaataaaatgataggaagcaaatgcacaagctaatgagatcgagcaaattggagtgtgggtgtaggaaggtctgtgcaaggccagatggtcctggaagacctctctgaggaggcgaggtgtgagctgagacctgaacggtgagtgggaacagctgtgggaggagctggaggaatgttccagaaacagggaagagtgtgtgcaaaccaaataagccagtggacggatgtatcagccagcgagtagatagatggaaatgcgggcagaaggggtctccttcaaagacaggccagggccacagccaagtcggcaggtcttgcccccctctgccggggtccttcaccttgatgggccacaggcccctctgagggtccccagcgttgggggtgtcctccctccagtccctccacgagtgacctcctccgaggtgcccattccctcctcctggtgttattagtgcaccatgaataatctttatcctccttcctccatgctttttcccttcttaccacctcctgactccctgctcacaggccgaggcctgagaaaaaagtccatgggctttctgagcccgggttccctctctctgaatggagaacgtgcccgccacgcctgctaggttctgcctcttctgggccgtgggctctgactccagccttcctgtgtgtgacctgcaacaagtggtcactctccctgagcctctgtttgtttttgtttttgtttttttgagatggagtctcactctgtcacccagtctggaatgcaatggtgtgatctcagctcactgcaacctctgccttctgggttcaagcaattcaactgcctctcagcctcccaagtagctgggattacaggcacgcaccaccacacccggctaattttttatttttagtagagacgggctttcaccatgctggccaggctggtctcaaactcctgacctcaggtgatctgcccaccccggcctcccaaagtgctgggattacaggcatgagccacccggcttggccctgagcctctgtttctgcacctgagaggaagagagcaactacgccccccaccccatgctgcttcccaggcattggctcacaattctcacaactccctgccgatgggggcattacctggaccacccttcacagatgcggagaccaggcctaggagggacactgtggcttgaccaaggtcacatgtccagcaagcggtgcagtgggattaaaaacaactcaggctttcgctgggttagacactagggctatttcaacaagagtttcccaattctggtccctgtcttctggttatgtaagagcatgtctttgttgtagaaaatacacagtaaaatattcagggatgagaatgtatcacgaactgtacctgcaacttttctataggtttgagattcattggaaattaaaaaaaattaaaacatccaaaatataaaagtaaacaaggaccagcgctccgtccatgccgggtcagtgcccaggccaggcacggagctggccgggctgccgatggacacacgttttgtattcactggctcctgaggggcgggtgatgtgattttactcctcactttgccaacgaggaaacaaaagcttagagtcgttcagccattttccgagtccacacagccagcgagagacaggatgcgtgttcctgaggagctttccctagagaggtgggagggtcaggagagaaaaaaacacgaaacgagctgcggagggctggggccggcgacttggcgcttcggggctgggcaggggaggcctctgggctgggaggcgggatggagatgctggctgccaggctgccacgggccagggcactgagccacgtgaaccctctcccctgccctgcagtgccctcagccctcactgggaagggaggggagcagagccccgtggctcccaccccggtcaagggctgattgatcctccatggtccccggagctggtcccctcgtccgtaccttgggctgctgcgtgttttcttgtctctgattgtaaacagatttgactaaagaggtaaattagaagttaattagagagaacatgattgatgaggcagtttgccgtgattgggaggcgtggaaaggatggggctccccccgggtggaggcgagggatgaggaagagagggggtagaattcataggcctgtggatctgcaggggtgcccagcaccttaaggggccaactcaaggctgccctttcttctggactccatggtcaaggccaggcccccaggtacgaagccccaagtggggcactcatgaaaccccataattagcgaccaggcccctgctagactctggggacaaagcatcaacctgtccctgatatggccagaatgttcatcttagagctgcaggctgggccggggaaggcgctggtgcttattaaacattgatgctgctccaggccccgtgcatgttcccaaaaccctgcaaggctgatgctgtatcaccatttttcagattaggtaatcaagattcagaaagctgaaccagcttaccaaggtcacacagctaacaggaacagagagactgacctctagagcagagcctctgcctttctgagttccaggctgtgtgccaggtcacgtggtccaacctcaggagccctctcaacagcacccctgcttacatacctccagcagtggtgagctcacttctgcccaaagaggcaggatagctcattatgggagctttgtccttgtgtggacctggtctaactccctccagagccacctccagggcccctgctttgccactcccctacctccctcacatgtcagaacacagacctccagggtgaggaggagcctcagaggtcatcctacccaactctctcattctcctggggaaactgaggctgagagggatacaaaacaccagagggacacagcgtgctggtgtcactaatgggtgggccttccctgtgtctggagtgcaggcatcagcctcactgtgcatcacttctctcccaggctgaagttgctgctctccattcactcatccattgcttccctccattcattctgcaagatttactgagacccgactgtgcactagggctggagaggacagaaagagaaaagcagaaggaccccttgcagtgctcacagctcagtcaggggcgggcaggcacgatggccaggcctgccaagaaggaggccaaggggaaggaggccaagggttaagagacctgtgagagggagagacagcccctccaggaagcagcactgaagccaactctggaggagatgcgagggtgttcttagcagagggaactgtggtgggagggaggatggaacattctagaactgccagaagaccaagtagctggaagagagcgtgagggggagctggtgggaggtgaggtcacaggaggaagcccagatcgtcatggaagaagttgtttggattttattctacgccatgggagagagtcattgagaatttgcagcaagggagggtggtcggttttgcatctgtggaagaagaccctctggctttgggagcagaacagaccacggggtgtgggttcccatgcagagggcaggcaggaggttcctgcggttgctgagagacacggggctgcgccccaagaagtgcacagatgagaaagaagttccgggttcaatgggcagggcttggagggattagatctggggatgtgggtgggtgatggatgggggtgcccctcgtgagatgggaaaggtcaggaatttggttgggggcatgtcaggagaggatgtgcgatagacagggtggtgcattggtcagggctaagagtgggacatagccttgtgcttcactgtggccccagctgctgatgcgctcacccaggtgaacgtgcctggtctgcgggcccctcccagcctggtgccaccttcccaggtcagtgcagcagtgtccctcttaaatggggagacagaagacagtggagcagaagagacagctcccctgttccaggctgtgcgctcctgtcagcaccaccagggtccacatgtcctggccaggggccttgtccctactgtcagtggagctggagtcctcccgagggcccgaggcccagcatcttgacttccctcactcctcagacgcctccatccctgagctggagtccagcaggagaacatccaccgaatcaggcccgtggcacaggaagccgggttctgatcaggcctggctggtagtggtcactgctcccgtttactgagccgggtgctatatgtagtaagtgatgatgtttaacttgtccaacaaccctctgcaataagcactgttattattcccattttacagatgaagcaatagaggctcagagaaggaagaggcccaaggtcacacaggctggacgaggcagtcggcactcaaacctgcttacactaggggggtactccagctgcctcttgacgaccgaataggcctttccagcctcactggggtgggggtgaggggtgggagagagcccctgttcaggggccagtggggccttacacatcccatccagtggagggggacaggagcgcagaacaaaggaatggtgacctcaggaactgcccggctggctcctgctctggaaacaccagggaccagggaagcacaggtttggtgactgaatagtggacgcaggacatgctgaggccagggccgagctggggctcagaggatgcacactggacctttggccagaggtggcctccttgggacacaggccttccagcctcttcccctggccagtgctggacttctagtttctttggctgctagtggcacaggatggaggactgatggaatggagtggagctccaggatccaggcctgtctctgcctaaattaggagacatgtgacctcagaaatccctgcctttccctgggccttagttacccctcctatacaatgaggtggcgcatcaagatgatgcccagattcctcacagctatagattatccgagacagagaggacaaacaagtcaatagcgaacctttattgagcctctactctgtgccaggtgctgaatgcatgcttctcaagtgtatctcgtttaatttttatgaagctggccaggcactgtggctcatgcctgtaatcccaacactttgggaggccaaggcaagtggatcacttgaggccagcagttcaagaccagcctggccaacatggtgaaaccccgtctctactatacaaaaattagctgggtgtggtggtgcgtgcctataatcccagctactcaggaggccgaggcaggagaatcacttgaacctggcggaagcagaggttgcagtgagccaagatcacaccactgcgccccagcctgggcaacagagcaagactctgtttaaaaaaaagaaagaaaaaaaagaataattttcatgaagtagtcaaataaggatcataatcttcactttagaggtgaggaaactgaggcttagaaaggatgagtcacttagaaaggattctcaggatcacgcagctgggatgcagtgaggctggactcatgcccatctctccctggcttcagatgaggccatccacagctcactgcacacgtgtgtgacggtgtgtatgcccgggtcagagctgcaccctgcaaggtgtgtgagaagtggggtttgaggggaaagggtgcaccagagcatgggaggaacagcgcagtgaatgtgggtggaaggaagcgagactaagcaaacatgcaactctggccaagtttctttatcacctccagtctcagtttgcccatcagtaaaatggggatagtcacagcccccacttcaggcagtttaaatgagaggagagaaagtcatgggcacagtgcccgtttgccaaatggtgagaagattctatctcatctgctctttgcaacagccctggggttggggaaggggagatgcacatctctcagatggggaaactgaggcttagagagaagtgagctgcacaaggccacatggggttgggatttgaacccagtggggagctgtcaccactaccccacactagcaaagagcagatatcagattatcaatatcggatggatggatggatggatggatgagtggatggccagaaaaatgaaaatgtgcacacagtcccgggaaatctcttcctgccaaagctgccctggggccctctacctggtttctcatggagggagggcagggcgggtgggaggcctgcagctccaggcgcctgggcctgttgccacctgctcacccacttctgctcctggacggctgttgtaccctgggcgggtgaagaggctgggaaagcccctgatgctgcgctgctttcgggatcacagctggagatgttcccagattagaggggaatttatcccctccgtgagctgctgtggcgtgatttacaggccttggcgagttccgtgaaagaccggagcaggttccagccatttaaatataattacctggtgcctccatccagattctgccagtagatcatgaatacagggggcccgggatgcccactgaagcctcagaagacagctcggcccccacccaggcccagcaatctggggtcaagtgggtcaagcctgtccgaacccccacccttgcctgaactttcaccattagaatgtcattcctttggtttaatgccccagccctgggtttaaagagcctttgcttcagtggggagaacattagcctgggtctctgaagacccctgttagaaccctgggcactttggtcaagtcactacccctcttctccttcttgcaccttagagcactgagctggaaatgctccccagtgatgaggaagctgtgccctcccattctagagatggagaagcagccgcatggagaggatgccgccagaggtgacctggaactcagaggaagcagagactggctagggctcagtgtgcctgattcccagcccacatgatggaggaaactgaatcccagcatcagaagttggtcaagccgggcgtggtggctcacacctgttatctcagcactttgggaggctgaggtgggagaatagctcaggcccaggaggtcgaggctgcagtgagttatgatcatgccactgcactccagcctgggtgagacagggtgagaccctgtctcaaaacaacaacaacaacaacaaacaaaaacaaaaacaaaaagacgtagccagcctgaccctttcccctccactcagctgagatcttggccctaaacaatgcccttggagccgaaggggcctccttgtggttaaaaactccagctctgtagactggaggctggggccacctctgcacctctgagtcttgggttcctcatgtataaagggtggtgttagcagtgcacactcacagggtcactctaaagcttcaaggagaaacatgagcaagagcccagctcagggaccagcctgcggccaatgcaggaagtgtggtttatgatttggaatcaggaagatccaaactgggtcccggatctgccacttgccggctgtcagaccttgggcacctctctgggcctcagtctcctcacctgtaaaatggagattcaaatccctacctgtcagtgctgtgagcattgaattataaaacaggttatgcacttggcacgtggcctgatacattctgggccttcagcaaatgatggctgcagctcgtggcaatgaggaagtaataacccctgccaggatgtggagtgtccggcttcacccggccaaccatagctgaaggcctactacgtactgggctctgccgtggcaaagtgacgagcaaaatccactcagtctctcctcataagcctctcagtcctgtggaggagaccagcacaaacacgtttcagaaatcacatttgtgtattcattcaataattatttctggagctcccacttggcgccaggacctctgctaggaaacaaggagccacagccctgttgtcatggagtttacatgtagtgaggacacggccaagaaatagacatgtaatgtggcagagaagggtaagtgttgaggaaaatatagaagggttaggggcttcagagggatgagggctgcattttagatgagatggtcctggagcgtttgcgaggcaaggaggcagacaggtggcagatacaggcccaggtcacagtcacggcgagtcttgtgaggtgtggtgagcaccctggtcttggcctgagtgaggagaccagctttgcaaagggaggcgccagggtgggagcctgccatctgcctcgggacccctgcagcccagctccagcatgcagcatggtgggcactccagaacacttggaaggagagaagaaaagaaaatctagaaaggcactctctggtgggggaggggcctggggatgcccagggcacagacaagtaacatggaggcctggtccctgttctctggccccagagggtccacgtccaccaaggtccgacatatggatgtcccagggaggaaggcaatttcagccaaatgatgataatgaaggtgtgtgtggtaaggaacgcagacatggcagaggacagagcatttcccatcgccgtcgcctctaatccaagcacctcatgaaattggctcttctatcccccattttacaaaagaggaaatcgagattgagccaacttaagagatttgcccaaagccaccgggtacgtaaacggcagagctaggtctcaagcccaggcccggggctgcctttctaagggacagtgcgcttcagacttggaaggagatgcctctggaggtatggggctccctctgattggagaggtcctggaagaagttagccccaccctgcagggtgcagctggccaaaggaggagccacatgcaaccttgaggatacagcagagaatgagagtgttgtttttgcccttatagagcttatggactggtaggggagataaacactaaacagctaggtgcacaactacttatttgattaaaattgtggtcaggtgcagtggtgcacgtttgtaatcccaacactttgggatgccgaggtgggaggattgcttgaggctaggagtttaagaccagcctgggcaacatagcaagactccatctctacaaaaaataaaattagctgaacatggtggtgtgcaccagtggtcctaggaagcagaggtgggaggatcgtttgaacctaggagttcaaggttacagggagctatgattgagccactgcactccaaggcagcagagaggcagagcgagatctgggtggcagagccagatccttttttttcttttctttttttcttttctccttccttccttccttccttccctccttccttccttccttccttccctccttccttccctccttccttccttccctccttccttccttccttccttccttccttccttccttccttccctccttccttctttcctctctgtttctttctttctctttctttcttcttcctttctttctcttcctttctttccttttcttttctctctctctttctttctttctctctctctctttctttctttcctttctttctttcacagagtctttttgtccctcaggctggagtgcagtgcagcagctcaatttcagctcactgcaacctcttccttccaggctcaagtcatcctcccacctccgcctcccaagtagctgggaatacaggcacgtgccaccacgcttggctaatttttatattttttttgtaaaatctaggtctcactatattgtacaggtgggtctcaaactcctgggctaaagcgatcctcctgtctcgggctcccaaagtgctgggattacaggcgtgagccactgtgcctggcaagaccccatcacttcaaaaaaaaaagtgaccaggatgatggctgttactgctgctgcttccaccaccctggcactggggccctgcttcctctctgaagctggagaaggctgggcagccctcagaggctccctctgctctgcagcaggaaatctcaggaagacgctgtcacccaaggggaaagcaaggaggattaacccctgaggctgcaggcatccttgaacaagcccagctttaccagccacctgggcaggtcctccccaagcctgaggccctgtcttctgcctgcctccacctgagggctctgatggcagaggctgggggcagtggaccttggtcccagccactgtgtgacttcagcccagccacttcatctctctgaatcttcgtggtttcagctgtaagatggaatgaacagtcccatccttgtcacgaggatttggtgagataaatcctggtgtctggcacacaggaagcgctcaacagatgctcatccccttctcctgtgtggggtccatggagatactaggcccaggcctcccttagaggcatctagctctgtgctgtccgctatggtagtcatgagccacacggaccattgagcactgaaaatgtggctgtccaaaattgagatgtgctttaagtataaaatgcacacaccagattctggtggcttggtatggaaaaaggaacgtaaaatatctcagtaataatgctttatattgattatgtgttgaaatgataatatttttgatatattgggtgacataaaacagattatgaaagttaatttcacctgattgcttttacttttttaaaatgtggctactagaaaatttaaaattacacaggtggctcgcattttacttctgttggacagcatcggcctagctaattactcacaaccatggaatatttagactggcattaaccacgccattaaagtcagttcaggattttaaaaacactcctacaagcagggccttgtaattggcagagaccctgctgtcccgcggtgtttaataagcacttggtttgcagggtgaagggccctaggaacccctccctgatgcaattaattgcctttgatggggattgtcattaggcttcttgctgggacaacacagatacgagccacatgtacttactggccttggtagagtgcaatttgtgggtttaggttcaaatctgagggccaaagcctggagggatactatgggctgaatgtgtcccccagattcatatgtggaagccctaactcccaatgtggctgtacggtatttggggtaaggaagtaaataaggttaaatgaagtaggaagggtggagctctgatctgataggattagtgtccttataaaagagacaatagatattaggctgggcacagtggctcaagcctgtaatctcagcactttgggaggccaaggcaggcagatcatttgaggtcaggagttcaagaccagcctggccaacatggtgaaaccccgtctctactaaaaatacaaaaattagctgagtgtggtggcaggtgcctgtaatcccagctacacaggaggctgaggcaggagaatcgcctgaacctgagaggcagaggttgcagtgagctgagatcacactactgcactccagccttgtctgaatagagtgagactctgtctcaaaatacataaataaataataaataaataaataatgagaagagacaccagagaactccctttctcccttcctcttccctctcccaccctcttcctctgcacatacaaagaagaggtcttgtgagcacacagccagacagcagtcacccccaagccaggagaagaggcctcagagtgaaacctatcttgctggcaccttcattttggactttccagcctccagaacagtgagaaatagatttctgctaatttctgcttaaccagtctgcagtgttttgttacagcagcctgagcagactaggacaaaaggttctttgggcctcggagaagttccctctttgggaagccacagagctggatgttttttgaggagctgcttggctgcacaggtgatgatggatcctgtctgacctcctcaggcaagtggcatgtggaagaaggaccccggcctagagtcaggagacctgggtctttggcctcgttctgccattccctcactgtgagatcctaggcttctctccatgtctttctagacctcagttcctctgtctgcacaaaagggacatgaggattgatctttgatggccttctccgttaaaaattagagatgctggctgggcatggtggttctcgtctgtaattccattcgccacagtgggaggatcgcttgaggccaggagttgaagaccagcctgggcaatatggttagactcctatctctacaaaatatttttaaaattatctgggtgtggtggtgcatgcctgtagtcccagctactcgggggctgaggcgggagaattgcttgagcccaggagtttgaggctgtagtgaactgtgatagtgcctgccactttactccagcccgggcagtagagtgagaccctgtcttaaataaataaattaaaaagatgctttaaatttaagttttaggttttagattatgtcttcactctgtgtggtccacttagaccggaatccagaagaaaaatgtcagggacactccctaggacttctggcaaaggcaggagccagaatgaatgaatttcctgtgcccaggcccccctgctgtccctggctcctagcccttggcccaagcatggctctcagcctagacaaggccttcctaggaggcctaggagccctgcgggaggcagagtgcagataaaggctcggagtccgtccatgtggaaaacctgggtctgcggcgatcgtgaaccacatgggcagaggggccagacctggggttcctatgatgggaacatgatgtgactgtggaggccagtcaaggctcctgccagcggtgagtggaacagataaagaaatcagtcatcagaggagagaagtaccccagaccggagtgggaggtcacatatcggctccctgtgctgccctccagaggggaactggggcagaggggcctcctcattccacgaggctggctgggctcaattcaaggaacccttgtcctcccacctctgttggaatcctcactgcagcccactggatccctgcacgagacacacctggggtgcttagtgagcaggcagattcccagatacccaccccgaaaagccagtctgaaagagaacacccaggggtggggcctggccacagccagcctctccagagagtctcaagtccagtaatatctaataactctgtgtttaggccaatggtgttcaatcctagctgtggactgtgatcacctggggaattttttttaaaccctgatacccagatctcacctaagaccaattatgtcagaatctctggggtgtgccctgggcacccatatattcttaaagctccccagtcgtcccagtgtgggtccaaggactgccccagctccagatcaattctaagagcctcaagatgaacatctggggaaaaggagaagtcatgagtctcagataagagaaataacttgcccaaggtcacacaaggtggtgatggcaaagcccgtcctgaaacccaggcctctttcctgaccgtgggccaatttcttcctgatgctgcatctctttttaaaaaccagagcccaggcaggcaatgcccacagtatttcactttaataatattggaaaccggtacagtcagggccaccacagtggtggggcgggagcctcgatggcgattaggggagctgtaagtctttcgctttatccaaatcttgggcagtaatttagaaaatttaattaaagggggagaaatggggacacctcgcgctccctgcctcctgttataatgagtgaaatacaccaggctgtaaaaggaaatgctgtctgagacgcagctccgatgttttattgccaagttttattcactgatgtaaacgtaatcgctggaaaccggagctcttattaacacacatattttcacacatccggggcccctcctgctcccccctctccctctgggcttgttcacccacctcctagggtcagccctgctgctttctgggcatgtctatgccaagcctggagttccgcaccggtttcataccctcccatggcagataagactttaatagaattccattgctcctcagagctcagtaatgcattctggaaattaggcggctacatactaaagccattgttcccccttataaatgggctctctcaaagccagtgaccatgggggctctgataagctctcatgaagcctcactccacatgttattggtgtgctaaaaggtgcaactccaggcttacattgctcattgttaggggctgatacatttaagtagtttctccatgaatcaggcagcctaggtatttcccccactcttggcattgatagatgagcaaaaggaagccatttagatggtgctatatagggctccagcccacgtggtgaatgatttccaatgcctggtttaatttatttttaaatgaaatttgttattgattctggattaaaaggacaaatcttacagctgttaccactgacagagccacagtgctcaagtgacacctctcaaggaggggagggagggtggcctgtctgagtcaaggggagggtatggagactctccagggagcttggctcagcagtaaggggcagtgcaagatcccatgcttagagggaagtttaaaaatatcatctttcccaattgaaatacttgacgtgatgctcacctctgagcctcatttatataatggaaatagcagtgatatttgcctcatggcatccacacgaccactagaggcatgttagttgcctccagggatgggaggctttccatctcctgcagcattcccagaatgaaatgagtgacaggcgtcacccactctagtgaattcctagagactgtttcctgggctagtctttgcttaccttctgcctccactaggctctcggcttccacggtgcccagagattacacttgcattgggaagcagacaagaggcacaattacacaggggaggaggatgggctgggatgtgtccgttcacattcagcctctgccctacctcactgtgcaactttgtgcaggttacatcatctttctgagctttgtttctccatctgtaaaagaaggaagggtataatagcagcctcaggggttgttgtatgaattataggagatcatgggtgtgaatgtgatttgtaaactgtaaagtgtagtttaggtgctgcaggaaatacaagtgggacagtacagtatagtgggaggtctctgagttgggagacaaaggacctggatccagttctgtcatgagtggctgtgtggctctgagaaagtgaattactttctctgggtcttagtttcttaaggtgccaagagggtaggttggaatcaaacatatgaaatgtttgattggctctggaatcaaacacatcatggccttgctatgtcgctttaggcaaaatacctaacctttctgaacctatgtcctcatctgtagatatcaagaacactagtcaacatgtatcatgtatttgccatgtgcctggcattgttctaagtgctttccatgtaacaactcatttaatccccaccaccctgctgtgaaggaggtattattacccttgttttacagacgagaaaattgaggcacagggaggctaagcaacttgtctaagtttacacagctaccaaatggcaggattcaaaacagagaatatggctctagagcccacacttctaaccacaccatcctaccctacctggcctggtggttctgaggattaaggggaataatgaaagttcttagggccatgctgggcatacagtgatgagccaacagaggcttggggactgggagaaggcagcaggcatttcttcccatggggactcaggctggacctcgcccaactggggactcagctagacagaggggaaggcatacaagcacaggggaagcactgggaaggttgaagatgtaatgaggccaaggcatgcccaagagagcacaggatatgtgcaggaggtgagtctgggaccctgaatgcaaactagagaagtcaggatttctcacataaacaggccatcagagggtttttttagcagaaccattatatcatgagcattttcttcttttttccttttttttttgagatgaagtctcactctgtcacccaggctggagtacaatggtgtgatcttggctcactgaaaactccgcctcccaggttcaagcgattctcctgcctcagcctcctgagtagctgggattacaggtgcccaccaccactcctggctaatttttgtatttttagtagagatgggatttcaccatgttggtcaggctggtctcgaactcctgacctcgtgatatgcccacctcggcctctcaaagtgctggcattacaggcgtgagccaccacacctggccgatcacgagcattttcaaaggcatacaatccctggatgtctgtccttgaaggaaccttgaccttgttccaggcttcaaagagaaaagatttctgaaggtcagccggtgggctaggggcacagcagcaatgtgctgccatcccgccagacccccttcctctgcaggcctgagcaatctcttgtttactcctctttaatctcctctccctccctgtccccttgcctgtgtctgctccctccaatctgtggtttaagaggagaaagcccgggtttgagtcccagttctgtcaccacagtctcctggtgaggcctcaggctggggttgaaggagtcctgggttttagtctggctaacatggtggctgctatgtgatctggaggattctcagtttccatatctttatgatggaagcagtagttcatttcgctgggagcggggttcagggtagttaatgaatgagaaaacacgtgcatagagtccaagacgcctggccagcccaggataacctaaacaccacctctgtgtgggaagaaagtgagaagtgagagaatcaggcaaacacggccccttcctccaaggcatgtggtccagaaggttcggggggtgggggaagcggtcgacgcttgggacctgtcctcggtactgaagggagcgcgggggctgtggacggtgctagaacacagtgcttgtaagtgcgggacatcgtggaggaggtgtccttagtttggaaggagctggattgttgctggctaccacgggccccatccggtgtgctaccccccccccataatactggaaggggggcgctaagacagagggaagacggcgaggggctatgttccttggtctctaaccttgttctcaaacttgggcgctgtacacacggctggacgcgggatccacctgtgttctggagtggggagtgggctgtcggaggggttgaccctgttcgacggggacggggaagaaagtctgagggtctgtccacggtgtgaaccctagcatcaaagggccagttgagacgctgtccacggtgcccaaaggatgggcccgggtggggcggggggcggggggcggggggggggctggcgctgtcctcctccgtggtgctgaaaccgggaggaccaggctgtgtgagcagggaggcctggggaagggcaagggatgagagcaggagggaccccgcccaggagtcaggggcctcgcccgactcgccgtgggacctcagagaagctaattacctgatttcaggcgcttccttatcttttaaatgggaccacagttccgccctcctgtctgtcccatcagccccagtaacacggcttgggaaggaactggaggactttgttggattcttgctcttgggaatgggaatggtgccctatccccctcccctgccacactcacacacacatacacccacgcatacgcgcgcgcacacgcacacgcacacacacactcatgcacacacacaccatcaaggctcattggtctagggaaggagcctacagtccagaagggggcgatcccatccaccacataaggtccagtatcttcaagagccaggagccgcaacaactaactggcctgtctctctcccattacaaagactcgaaaactgagtcccagaaaggggaacaccgacaataataactactgagctcctaccacgtaggcagcattatgctaagcgctttgcatgcacgatttcgcaaatcctcaccaggacccccgcagacagctattacccctatttctcagatgaagacttcgaggttcagagaggggtagacacccggacgcgatcacacagcgagccgaggtcggcggcagagctatcaccaggtcccctgggtctcagcccaggctcccaccctacctcgccctcacccccagccccactggcccctgaccccggccccgccctgccggtaaagttaggagcctctgagtgcgctggcctggcggcgggtgccctggcttttctccctctccccgctggacggcatttctgtggctgaagcccgttgggtcgtgctttgcgggaaccgcgtccctggggtggctctctccgccccatcccggccccgcctccgcactcgggcgggggaaagttgcgggtaccgctttaaaaatcccagcctgggcaaaactttgatgataaatcaagcggcagatccctccgccgcctgctccgagcgggaggagggaggggaggagggaggggaggagggaggcgggaggagggaggagggtgcggcggcggcgcggcgtggccttccgcggaagggaagagtcccgcagtcggaggcggccggctgggcgtgcgctcgctccccgaagccggggctgggccggagccgggcgagggctgggagctgggccgggtccggggacagcgggcgaggggcagctgccggagccgggcagccaggccgctcagggcaggggacagctggcgccggttctgcggtctccggggcccagatgtgaggcggcggcgcccccggcccgagagcgcacgatgggggccccgctcgccgtagcgctgggcgccctccactacctggcacttttcctgcaactcggcggcgccacgcggcccgccggccacgcgccctgggacaaccacgtctccggccacggtgagttcggtcgccgcccccgcggacttccccaccaaaccccaacccgggccgcgccactccaacttggccgccccggggctcgaaccggcgccagtcgtggcgggcatcccggggcgccccctgccggcgcggtggacccgccctggcaccctggccctgcagagaagggggcacccggggcgcacccccgaacctcctccccacacactcgcgcggatacgcacacctgcatggccacaccgatatgcacagccgcggacacactcagagccacagtcgctgctttctcacactcacaactcctaccctgcacatctccacacacctcaggtccccctcctcactgcaagcctttacacttatgcccactacacacgcacatcaggcactgcgccggtgggctcactctgccagctggcgcacacgcttcgccacaactcttgcctgcccacctgcagacacactggtgcgcgcgcgcgcacacacacacaggcacacacatacacacacatgaacacaatttgctcacccactcctctctgcccatctgcctttactcttctgggtttaaccgcacagaggcccttgtcctcttcctctccacacccagccctataccactggaaaggtccttgggggcagaagaccttgtttcttgagaactggtcgcctggggctgcagcctcccagttgggcgggtggcacctggtggaagcccctcagagccaccggagtagttggggttgctgcttgcagccagaggcatgggagtgggagtggaagtggaatgccgggtgcttttgtctgcctctggggatgggcaggaagccgtgccatccttccatagggtacccccatcctcatcctcggccctagaggactgaaatgtgggaaatctcaactccagccgctgtggaagccggggagcagacaagcattcccagcactggctggctgagtgtcagaagctcctgctagccccgaaggagcccaagttggcagcagagttggactgtatgagcccggcagctgtgggggctccccctgacccctgtgagcctggctctgggatggaggctcgagcatagatgaaaccaaaggagacctttcttccatgcagcccttcactagacaggctgacagccttgttggggaggctgcagccccagtgctgggcactgtgggcccagggctgtggggaggtttgcacaaaggccagataattggatgatttattctgatgggagtgagtgggggtaaggcagggtagataatcagggaaggttttgctggggtatgacacatgagtgggattgctccagtggagaggggggcttcgaagccatcctcagggtctctgctttttgggaaccatgactccccgcccccttctgcctcaccatgtttggtagtaactgctgtgtgcatcatttacatacccttcatgcccctcacctcatttctaccgacctggctagagcggtggtaaataaggaaagggttcttttgatcctcaacttacagatagggaaaccaaggctcagagaggtgaaggaagttgcccaaggtcacacagtaagagagtgactgagccaggacaggccccagggtctgtcaggcaaagacagcgcttttttccaggacattcatctccctgtcagattccctcccattctagggaaactgggaattcctccctctccacccctcctctcctcgctccgctcagtcccttggcacagttggaacttacactaggaggggtttccatggagggccttccctgagtttgcagtcccgaggggtatgaggaatgggactctgaggcttatggtcgttctgtccctagagcaccagaccccagggacttgggtgccagtctgttattcccaaggccccaaggtggctcccccccatagaaaagcagggtctgtctgccctttgtgtgacagtctctacctgtcccctggtgccaggtaagctgagggggcacagctctgcccaaccagctgtaatctcccctctgcaccctggaaggtcaagctaaggcccaggacaggggctagatgagaaggaggcacccctagttgctggggaacctggcttctctcctgaaacccccgtgtggctctgggcaagtgagccacccctctgggtctccctgtgtccctaaagaaacaaagaagccaggctgctctgcaggggccaggctgccttcccccgacattgccaggttcaaagtcaccaagtagtgactgccgaggagcccccacagctgcccctctgccgtgccaagcacccgccaccacaggaagggtttggagccactcacttaatcacaaaaagaaactgttattaatgatagtgagacgcggcgaataagtgggtcatgtctaataagctatttgtgttcaggaggagaataccaatttgataaaagctgtgtgtgctgaaaaagctcagaaattgctgtttagcagattggggcctgatcatttcattattcctgggctccgtgtgtcctcagctgattcaggaaatgtggcccagtcgggaaggtgtctctgtgtctgggggtggggggtgggggctggaagcaggggctcctggggaggggcacattgaccccaagtgcttggtggctgctcacccctccaactccatctgagcccagcccggccgccgggctcctgccttccacctgcctgccctggagcttgtcacagggaaagcctgcggtcagatgggtcagaaaggacatctgttttgcttcccatctccctcccacctccactcaaggtacttggaagagggctttttcgaggtgtgaggaatgaatggggagcatgtatctcaaggaggcatcaggcactgggaggtggggtggtgatggtccgtgtctgcacctagtaggtgctcaataaacaggagtgattttgattttttcttatcagaaaatgttaactcattgcccatgggcacagcagggatgggaggaaaaggtgcaagcattgatgaaatgcctactgtgtgccccgtgctgccaagcccttgccagtgttaactcactcaggctgaccattcatgcaaggttggtgttggagataggaggaaactgaggctcagagagggccagtgacttacccaagggtgctgagtctgtacagagagctggaaagctgtgtttaagatgaagatgcatctggcagctctgggactgcctcctccagaacagccttgaggcaggcttggccatggcgtcttccttcttgtagccgtaacccaagctttctcccttctagctcctcagggaaccagtaaagcagtgggttccaccaagaggaaccagccactcagaaaggtggcaagatcttgctgaggatacctgtaggttagaaacaggcagctggactggaccccaggatctttccagatcttgtccaggggagggatccagagggcagggtctttgtgaagatctctgtagacccctacagcttgcagaggacccctacagcttgcaagaagcctcacatggcagagtcccccagggaattttttacaatgcagatcccccaaacccgctgccagaatggttatttgatgggaccctggaatgtacattttattattattttttaatttctcttgagacaagatcttgctctattgaccaggctcgagtgcagtggcacaatctcagcttactgcaacctctgcctcctgggttcaaatgatccttttacctcagcctccgagtagctgggagtgacaggcatgtgctaccaccctcagctaatttttaaattttttgtagagatgagagctcattatattgcctaggctggtcttgaactcctgggctcaagccatcctccctcctcggccttccaaagtgctgggattacaggcatgagccaccgcatctagtggaatctgcattttaataagttccccagaggattctcatgcagcctgggatttggaagccactgcctaagtatttacccatacctggtgggagatgtagggacaggaaatgtctgacgctatggactggcttggtttggtttcacaggggagggagaggtccagacaggggcaggtggatggtccctgagaggagctccaagaagcctcacactgcagcagacaactcccctcccacccccaccctgccacacacacacacccctacacacacacacacccacacccacccctaggccagcaccttcaattattcatataccccagtgcagacaaagatcctggcttggccgggggctttgtccattgagtgattcactgtcctgagattctctctgttgccaggagggaccagcagggtgctgggggagggagggggcaccgggccatttggcaagcagcctgtgcactgaaaaatgactctggcttcctcgcattccttactgaactgttggtatctcaccatcaataagctggctagtttggtggctggaagatgaagaaaattgagtcctgtcttccaaaggttatgatgttaaaaatgtgttcgtctttgtctcgggcgttggtgattattctatcaattacgcctgtaaacactctgccttgggctgagggtttcccggcctcctgtggggaattggccctcacaagcggttttccccaagtccttcacaccaattggttttgacaccttgcccatcagcagctcctgcagccttttccccaaacaagagaagccgcaggcggccagcaggacgcagggaatttggctccttgccatggtgacagcaaggatggtgggcaaagtcgcctgcggcaaacaagtgggcagggtgaggggagtcgggtaagtgaccccttctgatccaccggctgtgggggcaggagatggagcttttggaatgaatcatggaggccccttgggaccatcgtcccaagcctctctcttacagatgagaagacagagacccaggggcaagggagaatttgcccagaattgccctggagggtacttcttggcttttgggattacctcatccaactctgtacaaatggagagattggctgggcacggcggctcatgcctgtaatcccagcactttgggaggctgaggtgggtggatgacttgagcccaggagtttgagaccagcctggacaacacagtgagaactcatctctacaaaaaaatagccaggcatgggtacgcacctgtagtcccagctactcagtaggctgaggcgggaggatcacgtgagcccaggagatggaggttgcagtgagctgagatcgtgccactgcactccagcctggttgacaaagtgagaccctgtctcaaaagtaaataaatagataaaaataaaaagaggagagataaacatatggaagcaagtgtgtgttgagtgccatgccagggccttgaatggtatcatctcattcaattctaacgagaactccaagaggaaagactgtttcgggcccactgtttagatgaagaaaatgagactcggggaggttaagtggcttacccaaggtcacacacctaccaagtgtcagaggctggacttgaactgaagaatctggcttcagggctgggagtccaaggaaagaggaggaagaggcccacgtcacacagaggggaagagcagggctgggacttgaggcttggctctggggtggaaggagtgcaatggcctccgcattccacacccaggagggcgagcagcagtgggaacagaatgctatcccagcgaccctccaacttccctcgattttcgaaagcatggggagagtgtgtagtgtgaacagcggcacaggtgcccacgtgagagtgtttggccatcaccttggactttggggaccaaaccagctgctgatggtgttgtgggaagactctctcagtcctgaaaggagtttggggcccgctgggcacactggggtcagattcccttgtgtcctgggacccaggacaatgcccggcccagggaggtggcagggaatgaatgaatggatgacgaggaggacgaagcaggggatgaggtctgaattcttaaagctttgctcattccaagtcaatatatttttaaacattcaaatgattttaatttcttaaggaatctatgtttatagggggaaaaaatcacaaaattggagccccctccttatccctgctgagcagagcaaggacatcctggagtgggcaaggctgatggcaccttgcagtgggtgggcccaggctctggccttggggtgcatatgtgatgctgcagccatgaggatgggggagtccaagggtcgcgcccttctcccctgaccctgatgaggcacttgcatcagaaaaagcagcagtggtccagctggggaagaaatctgctcctctcctagctgctggtcctggggtccagagcccacccagctggctccccctggttcccactgctccagagaagtgaggtggcagtggggaggcagagaggggctgctgctcctccaggttcccttctcacagccaggcctcccttcccttccttgaagccatcagggcgtccctgggactcagctccacttcacccccagtttcaaccctcttcaaaaccccccagggcccgcaacaagattgggtcctaccggagagatgattttaggcagaacctagagaaacctcttacattttaatagttaagcatttattttaatgtgtactgaaaaaatataactagcacatcaaaactgtgatttcacacatatgattgcttaggatgagactaatgggggtattaaaaaatggtgggttagtttatagaaaaacattaaggacataatagcgcaggcggtgcgtgggcatgtccgtggggatccacagtgtggacatgacttggagacccgggggcatccaacaggctgccctgtcacactgcatgctccatactcttcatactgggagctactggcctaatgaggctgctgccatgtttgggaagcttggtcattcattcattcttttattcattcaacaaatatcaattgggcacctgtcatgtgccaggctcttttagccactgggaacttatcagtgaagaagacagctaaggttcttgctctcttagagttctcagtctagtaggggagacagaaaactgaacccataaagaatatgtaagtatagagctgggtgcggtggctcacacctgtaatcccaatgactcaggaggctggggctggagggtcactggaacccaggagattgagaccagcctggacaacatagtggaccctgtctctcaaacaaaaaaaatacagaattacccaggtgtagtggctcatgcctgtggtcccagctacttgggaggctggggtgggaagatcacttgagcccaagagttcaaggctgcagtgagctgtgattgcaccactgcactccagcctgggtgacagagtgagaccctgtctcttaaaaaaaaaaaaaagaaaaagaagaagaagaagaagaatatatacgtattgtgataagatttaagaagctggggccgggcgcagtggctcacacctgtaatcccagcactttgggaggccgaggcgggtggatcacaaggtcaggagttcaagaccaccctggccaagatggtgaaacaccatctctactaaaaatacaaaaattagccgggcatggtggcgggcacctgtaatcccagctactcgggaggctgaggcagagaattgcttgaatccaggaggcggagatagcagtgagcctagtgagactccatctcaaaaaaaaaaaaaaaaaaaaaaaagctgggatgatattaaacacagaaacacagagaaggacactcacctgtggggcagggagggtacccagtagtgagctccctgtcacaggaggtgtgcaagctgagccctacccgttattagctggggatattagtgaggagatttctgccttatttcccaaaggagcaaagactgttgaagtaggcagagcagccagaacacagcgggcggctaataaagatccgtcacacggcaatttagtgtgtgctggcacaagggcccaggtgggtggagcccccaacgccgaggatgccctggccctacccaggggtcatggcagggatggggccttctctgtcccctgtgttgaggcgtgggggacagtggctcctcggtgacttcacttcagctcttaaagtgccaggatggggagaggggctggggtaatgctgttttttgtctactatactcccctctcccccaccctgtgcctgccttgctgggtgacttggcatgtccctgcccctctctgggcctcagtttccccactgaacaatggtgagtttgcttgagctccaagcctgtagaattcttccatctgtatacttagaaaccacatcttttgtcctgcagccagcatgtatgtgcgtgtatgtgtgtgtgtgtgtgcatgtgtgtatgtgtgcgggtgaggatggagctggtgggagtggtaggattccatcagcaccttaactctcagtggcctgcaggcatctgcggaccaaacagcagccagcgttcatcaagaactctgtgttttcatcacttcccctgcctcctcccatttactccccaccatgctaggaggcgggccctcccattttacagaggaggacactaaggggcgtggtgcgacttgcctgaggacacacagatgctgaacagcaaagccgggcttgagcccagcttgtgggacgacagagccagagttcgtagcctgcgcatctgtctgctcctggctgccaagctgtgtgtgtgggcaggtgctttgttctggagcagcgctcctggcttggtcagattctcacaggggtcagtgatgccaaaatgctgagaatgccctgttctggctacaagcacatggctccaaaagtctaggctctgcgtctgggtccagcactgttagtgggaagcagtggggctctgggggcatgtgtgagaccctgtgtgttcctgcctgggggttctggtggatggagcggtgtttctgtctgactgtgtgggtgcgggctgtgtctggggggtgactgtgtgtggttgaaggggcagtgcaggctgagagggagcctgggggcaggtcagggctgggctggtgccctctgccctgtgcctgtttgcctcaataccagccttccctgccacctgcacactggtgcccttggaggtgaggctatgggagcatctggaaggttagagcaggagtcagagccgggagagggggcctttctccagcaagctaccagcgagcagggcagcagtgcccacccgtacctgggaagtgccctccaccggccccttactctctggatctctctctctccctgccctactgctctctgggtctctctctttctctctccccctctctctctgggtctctctgatctttatctcttttcctctctatctctgtctttcgatctctttcctctttctttgctcctttgtgtctgttggatccatcttcccctctcttctcaccgcccccacccattccttcctttctctcgggtatgcacacagctctcttcgatgacatctcaggattacacatacatatattccgtatatcatggtgacacccacacagagcaggcactcagtaaatgtcaggtgaatgaatgagtgagtgaccaaatggcaaagctggaggggacactgacgcttgtctacactggtggttactaatttttttggaagtcacactcctcttaagaagcttatggaaactatggattgtttcctcaaaaaaatgccacagagttttgcccacaagcttcaaagggttttttgaggcccccaaagcctgtctctggccccaggcagaagtagcctttgtttcacgggtgaggaaactgaggcccagagagcagtcagggctggccttgggacatgggacaagtctgtggcagggacaggcttggatcctggagtcctttctctctccctgcagccctctcatgcgagctgggtgggaacgaacttcattcacttttcctaagtccttggtaagcatactcagagagctggggtcaggaagagataatgggggactcttcaggatcccagggaacagtgcataggcaggtgggccaagagagggaggtctctagagggagctcactgtgtcctagagcagtcaggggagacttcctgggggaggcaggttccttctgggcctgtatccagggactgctggggctgagaggggactccagaggccagagtggagctgcgcctggctgcctgggtctggcagaggcctcgtggagaaccatgtgcatgtatttagaaaagcaggctgcagctggaacctccaagaatcggctctggagtttggtcttacccctggagaagggggcagccctggaagccttctgagtggggagggcgcacggccaggttggcgtcggagtgggttggccgtggtgagtggagatggggagctgaagcaggacttggggctggatgcgggcgtgcacggacaggagaggctgctcccgggaaggcgctgagtttggtgtgagccttgctgagtttgtggttcatgggatgctggggctggccggtatccagggagggtgggaacgtgggatcagaaaaagagggaattgtgtgtgtgtgtgcgcgcacgaatgtgtgtgtgcgtgtgtgtatgtgtgtggtgtgtgtgcatatgtgtgtatgtgtggtgtgtgcatgtatgtgtgtgtatattgtgtggtgtgcatgtatatgtctatgtgtgtgtatatctgtgtatgtgtggtgtctgtgtgtatatgtgtgggtgtgtgggtgtgtgcatctgtgtgtatgtgtgtggggtatgggtgtatgtgtgcatgtgtgtggggtgtttatatatgtgtgtgggtgtatgtgtgggtgtgtgtatgtatgtgtgggtatgtctgtatatgtgtgtattgtgtgtatgtgtatgtgtgtgtgtattgtgtgtatgtgtgtattttgtgtgtgtgtattgtgtgtatgcgtgtgtgttgtgtgtgtgtgtacactggcctcctttctagtccttgcacacaccaagttccttccagaccttttctctccctggctgttccctctgcccctcgtgctctcttcccgtctcccggctcctggctcccctgtgctccacggaccccttagagaagccagaagcacatgacctgtcagagccgcatcgcacggcccgcagcaggcatcgggctcccattcaacacgcccaccttgcagaggggaaaactgaggcttagagaggcgtggtgagctggggccccacacctagttcaaagcaagggtgcagagcccaaccctatgttcccccagcccggcattttaagggtgtctcttgggatgggggtggggtcttgactgacccctccttcctcagagcccccaggctggggcccgaggtggggaaggcggagagctgacggcggggtgtctgttttgctttgtgaggttttaaaaaaatcatttccggcgttgaaggcggcggcaattagggcctgctcgctggggagctgtttgccgcctgtcgtcggtccgggaaagggtccctaatggaggcccggcggccagagcgcaggatagtggaaatagtgctcaaaacaaagcttcactaatggtctcccggcaggcagcggaggagagggaggggcggtcggacagcggctgagggcccctgggacagggcccagatccaccagctcctctctccatggccctcagacaccctccagctagtgcgggaagccccgggccccacccgcgctgctgccttcttgctctgtgctcttggcctgtgaaattccctcccaggctctgggaacactaagcgccaaggtcctggggtggggcccaaccccttcagccatgaattctctggttctagaatagccctagggtttaataagtccaaggggcccggagccttgaagaaggaggagcttcttcaagtagagccaggctacgtgaggaggtgacaggagagcagcctgatcctgtccgggagcccactgtgtgcctgcgtgatgtcactgcagcaccgctcacagcacccattttacagatgaggaaaccgggctagaagctcagagattcacctaccttgaggaggtgcagttgggttgaaatccaggtcagcctgactccggagcccacatatttactgttgcttccttgaatttcgcagacacgattgggcaggggtggcaggggctggggctggggcatgtactaggtcctgggtggggggtcaggtttgaccgaggccaggttctggtcagggtggggccaccaccaccctacccactgggcaccctcagagcctctgttctggaacatcccaagtgcctgcctccatctgtccctgtccgttggtctctgcctccccttttgccccgtccttcatgtccctggccctcctgcctccaccctcagcgccccttacagccctcactgttctttctcctcagtggctctgaggctgctcctttctggcgtgctggagcaaatccatccctgtgattgatgcagcctcctttgcttcccccacttcttccctcttagcccctcccggcagcagaggatggctatgcgcctcggctttgggatctgacactaaggctcaaatcctgccccgctccagcctctctgagcctcgttatgcatccgtgcaatgggctcaccccactagctttgcaggatgtactggggagaatgaaaataaatggtatcggtagagacgtcgggacgcctgtgtgcctgctcccggctcctggctccctgcccccgcccctgccctatctctggctccctgaacactcccgcgcttgcctccctccctcccacctgctctcactccttgtggcccagacatgtgggaagaggaggcgggaattccactggggaaacctgctcaactcccacaatcctgcaagtgccagaatattttagttctccttaaatctccctagatttgtaattctactgctgtctacctcaatatgtgctggtggccttgggaggcgccctgcttccagcttgccggctccagcacttcctgctcagctatgtcggggtgtctggcagggaacctgggcaagtccccacccactccgtgcctcagtttccccatctgtaagaagaggacaatgatagtggccacttcccaggttgttttggggattaggtaggatattttattgtattaaagaaacacctctatgaaaagtaatgaattactgatgtgtgcgacaatggtagatgaacctcaaaaactctatgctagatgaaggaagccagtcacaaaagaccacatattatatgatgcagatgatatgaaatatccggagtaggcaaatgtgagaatgcagatttgaggttgccaggggttaggggagagtggggagtgaggagtttccttctggggggaagacagcatgttgggactagttgcatcacattgtgaatgcactagatgcgactcaattgtccactttaaagtggttaattttggccaggtgcggtggctcacacctgtaatcccagcacttctggaggccaagacgggcggatcacgaggtcaggagttcaagaccagcctggctaatgtagtgaaagcttgtctctagtaaaaatacaaaaaaattagtcaggcgtggtggaggccgcctgtaatcccagcttcttgggaggctgaggcaaggagaattgcttgaacctgggaggcggaggttgcagtgagcaaagatcatgccactgcactccaacctgggcgacggtgtgagactctgtctcaaaaaagaaagaaaaaaagaaaaaaaaaatgttagctatttaaatttttactaggcagggcggcccctcctccatcggccagagacaggcaaggacccacctgggtgaatgtgcttgtgtctaaggctcagcaaggagtgggttccaccagggaacagcggttgttgtggaccttctgggtgctacacactgaaacaggctcttcacttgcatttgcccatttaatcctcaaaataagcctgtaatcaatgacacagtgggaaaccagagctcagagtagtgaagcagcttgcacaatgccacccagcacgccagggagagctgtggcttgcatcctcaccgtaaatcctgggctccccctcgccctagtgcccgaccgtccccctggccccttcccctgttagccaccacaccagcacttcctgtgggtagagcacagtctgagctctgcggagcctggggttgcggagaaggaggctttggactggatgggacaagaggccgttgatggcgtgcggcccacgcaggagagtaaacagctctcaccaggggcaacatttctttgatgtctcctatttcattcaaaatttatgacttctatattctatcccataatatattcatgtttgttttaatacaaaaataacgttcttgtcccatgtttctggagtgaagtcaatgcctcaggaagttgctttcctggtttgagcagcacagaccataaaggggtcatccattcatttctttgttcattcattctccaagtatgcaattcaggtattttcattccttaagtgggtgttagttctcactacgggcaaggatgctgtcccaagagccacactggaagaatcggcaagattgggatagggaagtggcagggaagctttccaggtatgtggcccagcaggagcaaggcttggaggtgggaactagtgatgggttgtgagattgggccatggccatcggaagccagggctggtgctgggtgcccgctggtgtccacacttgagcaggacctgcgtcccaagccccttgtgattaagaagaaagtctctgctggtgcttctctgactttaacacctaaccttcgccagtctcccttgttaatgagaaaaaaacggagattgaggctcatagccttcagcaggcaagcttctttggctagaatttacgaatgctgtttggttttcatagcgtttatttttacagttaccctctatttatggcaagtgatgctgatttttcatttatggcggtaataaaagtcttcttttaacctgaatttatttaagtaaaaggggaaagatgctttgaaaataaatattaagtaaataatggtgcatgtggtacagggaccctgtggaaatggtgatggcagctaaaaggctgggcttgggagacccctctctggtatgcccttttctgttctgagtcccctctgactgtgcaaacctcagtcagccttcaggtccaagcaagtccccttctcctggtaacctcccctgactctccaggcagacacgagcctatctttctcctaggatcttctagaacctgcacctccttccatagctccaacatgcagtttgccctgcataaccctgggcagcactatgattcatggccatatgaacagtgcacattctgaacaactgtacatggcagtccaggttcaatcccagccattgttcctatagcagtctctggcatgtgtgtctctcctggggactgcaggctccctgagggcaggggcctgatctgtggcatcctgggaagcctggcacggggcctggcttagggtagggggtccatcagagctgatctcttccattccttttgagggaggacttaagctcctactgcacgctgaggcagacacctcccaccaaggcatgctgcagttccctaagctttcttacaaaatgccttcttcttggcttcttaggaagaaagcccatctgcgtttgtttgcctgtcccaaggtgaagcaaccttcatgaactcacacctccattcctcctgccgcaggcacctgtcaggggccaagggctacccagaaagaaacaaagagaaccctcgggtgcctccctggggaggagagggccctggacacagccaggcttctctgtttctggagggcttttccatcctgattatctgggttttcttcttatggggattttatgtctcctgattttagaagccagctgagatttacaggcggttgggctgggacctcattaaatcctccctctccagccctttccccgggagagctcttactctgcttcccagctgggaggcaaggtggccacaggccttcctgaacctggagcacacacacccttgtggccttgccacccagctgagctgggcatagagcaggcttcctggaaatggccccagagaatcacactttttctagctgaaaaggatggggcttagataagatttaggcttcagtgggggaaattttgcagccagcttgaagtcaggctgaactctaacttgtcccttgatgctgtgtgatctcaggcaccgactctccctctctgagccttggcacttcctctgtgaaatggggctgataatagtaccatctcatcaagtctgagaggatgaaaggggtcctgtgtacagtgtctggcatagaggaggggcttccttccttcaaccccggggcaggagactggctccaatggcccccaggttctctgagctttggttttctcacgctgctggaaaagggccaggtatggaagtgggcagtggctgcagaggctgtcgatgcccccttactctgtcttcatcactgcaacaacggagccagcagaaacagggaagtgtttgaattctagagtcccaaggtctgggtttgaatcccagctcctgctcctgacttgcagtgtgaccttgtgacacatgtccctgagcctcagtttccctgcctggaataaagggacaatgatccctgcccagcaggatcactgtgagcatcatatgggatcaggcacatcaccttcctgttgcatcgtgggctccaatcagaaagatgatgccacggggctgctgggctggcccgtagccaacaagggttggggagctactggcgaagcagccacccactcctggcactgtcagcctttatttattgccctgtttcattcttggttgcgtttcacaagatgactttatgggccatctcagggggagcctccagcctgcctgtcagtctggctgggtggcccctcagctgggccaggtgggccaggctggccttgggcagccagtggccacaagggccaggaggagagggacagtggggaggaggccggcctgccaagcctcacttaggacctccctgcttatgcatgtccatagtgtccacatgtctgtccctatccctgctcctgtgggcacagtccccccaggaaactccaatctggcacatagtaggcatccaataaatgttgagtgaatgaatgaactggatgaatgaatgaatgatttctatgcctattggttttttccttagaacttcaatcctctgggcttttgtctgaccttcctttctcccttgattgattgattgattgattgattcattcattcattcattcactcatgtgtttagtacatgcctagccacctcctgtgtgcctgatctgggctgggcaatgcagggtccctgacctgggagagttcccagcttgcaggagacccagacacctgtcatataacatctgtcatataacacactccagatgtcatataacacactcagcatctgtcatgtaacacactccagggcagggagaggcagcctcggagacctctgggggcaccaagcagggcttccaccctagcctgaggagggagagtacctttaggcagaggactacctgtgagtcaggattccagggacagtgtgcaggctgtgtccttagggggacacatgtaagtggccaggaggggctgcagttggggtctgggcagaaccagagcctgcagactttggatgccgagcctgggagcctgattttgaccctgagggctggtagtttcccaatgaggcccaagtacgggagcttcctgaaggccccaggcagcccggagtagggaaaatgggatccttcccctgcctgccaccagagctgctagagcagagtgttccctgagcatctactatgtgcatggtgttgctctagctgccgggacatggcagtgaacagactagaatctcctgcctttaactagaatctccatcttcaattctagttggagtacagatgatacacagaaataaaatgagcaaacatgtaataggggagtgatgagtggtaaggagaaatatgaggtagagaaaagggaactgagagagggtgggggagaagggagggcctcactgaggaggtgacattggagccgaggtttgaaggagttgaagatgcggggagggatattctgggaacaagttcaggggatttttgttttctttctctctttctttctttcttttccttttttttttttttttttttttgagatggagtcttgctctgtcacccaggctggagtgcagtggcgtgatcatagcccactgcagccttgaactcctgggccccagcgatcttcccactctaggagatttttattgtaaatccactgctgcagtgagcccagggaagccagtagaggctttaataaaattctggtaaaatatacataacagaaagtttcccattttccccatttgtaagtatatggttcagccgcatcaagaacattcaggctgctgtgcagccatcaccaccatccagtccagaaattgttcatcatctgaaacagaaactgtgcctgttcaatagcaactcccttcccctgcccccagcccctggcaacccccattctgctttctgtctctgtgagtttgaatcacaccatatttgtctttctgtgactggcctgtttcattcagcataatgtcctcaaggttcatctatttgcggcgtgtgtcagaatttccctcctttttaaggctgaatactactccattgcacagatggactagattttgttactccattcatcactggaggtttctgagtagggagcatcacagtgtgatctagtgagaggtggggccgggctgaggggtgaccaagggttcagtggggccacgttggttctcactgtgcctccctctagcctcagctctgccttggttttcctgaatagagctgcccctgccaccagtccccaaggggagtcctgctttcactctgatgggtatgctgaggaccaatctctgcaggcatcctggaggaggcagcctcccaccagagatttgaaggttggaagggcagggagggctgtgcagagggagacaggagattcagggctggaccagggggtctgggatggggaatctgggctcagagatggagggagctgggggctgcctgtgctggatgagcccctgtggcttgcctgagtcccactggctcccaggagccatgggagcaccagaggaaatgagcacagagaagagctagaggaccggtgggtgaggggctgcagggcccacgcgtgagtaaaatacagatgcgcccaatgcataatctgatgaggcgacaaggaagcaactttagccatctttctggagatgatagggtgtttgagctaggaggtgagagaaaggagtgctgtttattgagcacctactatgtgccgtgaggcgtgaggcacatgttgtcttgtgtcatcctctcatcagccctctcattctcccctttttccagataaaggaaccgaggctctgagaagcaaagtggtttgcccaggtcacacagctagggagtaggggaaatagagtttgaacccaggcctgaaggcaaaactctaagaggttcatgctgaaccagggtctgggaggttagggaggtcaggtccctggtctcaaacggcaggccaggtcctccaggtcatctcctgcctttcccagaagccaaacccagtggctccggccagagccacagagccatttcctgcagctgatgcaccgataatcaggcctggggttaattaatacatcgcacccccaattaaaagcagaaagaaagaagatgttgcattcaatcaagtcccattctccttctcctgcagaatcctaatttgtggacaccagttttaattgtcttcccagcgagcccagcccagctcaggccctgaggctggagaagacaattgcatccttctcaaaaatctgtaactataccagcctccctggggactggctgcaaggagttacctgagcagggaggggggctcaggggccgggtaagtcaaagaggagagatggattctatgtcccagactcagcagtgatgctcacatggggattagggtctgggtagctggagggaaagagtatgggtagggggccgggttacaggcttccacttagagccctctagaactgggttcagtttcaccatttactcagtctgtggccttgggcaagtcactgaccctctctgagcttcagcctccctatctgaaaagggggataataatgatcacacccactccatagcatcatggtgggaacacgagaaaatgtatgtaaagagcttgcacctgggtgtggtggctcacgcctgtaatcccagtgctttgggaggctgaggcagaaggattgcttgagcccaggagtttgaaacaagcctgggcaagatagcgagaccctgtctctacaaaaattttaaaaattagcttgttgtagtggcatgcacctgtactcccagctacttgggaggcagaagcaggaggatcacttgagcccaggagtccatggctgcgatgagctatgttcagctcactgccatgttcgtgccactgcactccagcctggatgacagagtgagaccctgtctcaaaaaataaataaacatggccaggcgcgatggctcatgcctgaaatcccagcactttgggaggccgaggtgggcggatcacctgaggtcaggagtttgagaccagcctggccaacatggtgaaactccatctctactaaaaatacaataattagctgggcgtggtgacgtgtgcctgtaatcccaagctactcgagaggctgaggcaggagaatcgcttgaacctgggaagcagaggttgcagtgagccgagatggcaccactgcactccagcctgggtaacaagagtgagactctgtctcaaaaaaaaaaaaaaaacaaaacaaaataataaataaataaacaaaacaaagagctaggcacggtgcctggcacaaaacaaatagtctttatttcttagagattatcagtacatcatcataatcagcagcagcagcagcagcatcaaaatacacatcaatctgtgtattttccagtttctggtgctggtgcagtatcctcactcagagttaggagagggaggaagaccctgttgctgattgagctgcctgctttcagtgggggtgagaggaactgagctccccatctctggaggtgtgcaagtgggatgcggaagtgtggagcctagcagctgaattttacctgataactcagaccaaatcctggtaggggctggcagacccgtggatcttggtcacaactgccagtcagaccaatgtttaaaatccatctctgtgtgaatcttgggcaagtcattttactttccgagcctcaatttcctcatctgtcaagtgggagtgggtgagagtgttagagacaatgtctgcatggtgttgggcacacaatagatgctcaggaaaggaaatggattttttttttaaacgaagctttctttcctgcctccctacctttgctcacagggttcctgcttcctgacattttcaggcctgcctctgcttgtcaatatccacccatccttcaaggcccctcctctcccatgtggaagtgaccctttcccttcccaatgcccaaggctctgcccttaggacatctatcactttctccttctgatgatctgagctggtggggctctcaggaccatcaggactaacccgaactgtacagaggagcagaggctcagagaggggagagagtctctggaagtcacacagcaagtctgtcggcagaaacaggctccgtcctccatccttggctcccagtccaatgctcccggcacttacctacgtccacagcgggcttctccctccggggcagcttggggtggaggtcgggacaggccttggtgctgctgactgtgaacagggaggcccagatttgtcgtcagatgcccagagccttgagtttcccacttgtcctgtggacacactgcctccttcactaccgaggtcagagtcaaaaggtccctgagggtgcctcccctaacccaccgcccgtaggcagctcctggccagctctggggatcagagaagccctgggaccacagcccctctatggagtgggagagctggtggccacacccacagctaactcgcttggctcccatgaggccttgaacctgcttctctccctgtcctcctacctgaagcccctccctgctcccggctctactacctagcctactggggctaaggcgagggcaacacctcctccaggaagcctttcccgattgcctccagctgggtgaaatgcctctgctgtgcctgcccaggcctttgcactcagaatgaaacagactccctaccctgccccacaggactctgcaaggttggccatttgagattgagccctttttttgtttgttttttgagatggagtttcgctcttgttgcccaggctggagtgcagtggcgcaatctcagctcactgcaacctccgcctcccagattcaagcaattctcctgcctcagcctaacaagtagctgagattacaggtacctgccaccacacctggctaatttttgtatttttggtagagacgaggtttcaccatgttggtcaggctggtcttgaactcctgacctcaagtgatcctcctgcctctgcctcccaaagtgctgggattgcagacatctgtcactgtgccctgccgcgggactgagcctttttaagaaatatttagggccaggcgcggtggctcacacctgtaatcccagcactgtaatcccagctacttgggaggctgaggcttgaacccgggaggcagaggttgcagtgagccgagatcatgccagcactctagcctggcgaaagagcaagactccatctaaaaaaagaaagaaaaaagagaaatatttaggttggcgcaaaagtaattgcggttttgaccattacttttcatggcaaacctgcaattacttttgcactaacctatagctctaccagcacaaggcatttggacactctgggaagagcatggacttgggcgtcacagagggctggtttcaaatccagactctactatgtggccgtggaagggttactccctggcactgggccttggctgcctggtctgagccatgcggacatgtgatggggggacctgaagctggcagagctcactcaccacctgctaagatgtcaaacacatgtggccactgagccctgggaatggcaggactgaaaggtgccatgaacatgtaaaatgcactccagttttccatgacttaacacaaaaaagagtggaacatgtctcattagtaatttcttttttccaagacggagtcttgctgttgcccaggctggagtgcagtgacacaatctcggctcactgcgcctcctcctcccgggttcaagtggctctcctgccttagcctcccaagtagctgggactacaggcacatgccaccacacccagctaatttttgtatttttagtagagatgaggttttgccatgttggccaggctggtcttgaactcctgaccttaggtgatctgcctgcctcggtcccccaaaatgctgggattacaggcatgagccaccgtgcccggcctcattaataattttcattacatgttcaaataattttttgatatcttggcttaaataaaatacattattaaaattaattaatttcacgtgtttttttttactttcctttcatgtggctcccaggagatggaatattccatgcgcgccttgcagtgtggcttgcattctgtttctgttggacagcgaggccctagatggccacttctggtgtcccggtggagaagtggccgtgtggcggggtcctcccctgtgctcctgcccaccccaggctgccatgccatgccagggcccagaaggtgtctggggataagagggtctctcctggctgaacccgggctgctgagttaccctatactagcccctgccctctctgagccttgccttctgcatgagtaggaagagctggtgggccagagtcagggttttctgtcggttggcaggggcgggggggccgtgggcaggaggagactgagtggggatgaattggaggcctggccctttccgaggagaccccagcggagcctccacccaagggcggccctctctgttctcctcccactcatgagacgcacacacattgtctcccgtgcccccgcccaccacacatggttcccacctcacccgtgtctgggagaaggaggcatgcagtggctgagtcacactggctgggtccgagggctggcttcagcctttcttgctctgtgttctgcattgagcaagttccctgatagttctgcagccatttccccactggaagaggggaagtggaggcactctctgatttccgtggctcaggcaatggcacctggagaggccacagccgtgtccctccactgtcttttgaccagccagggtcacactggtggtcataccagatccaaccagggtcctcacccctctcctcatgtttgcaaatgcccctggtgccctggtgccctgctgctgggcaggagggatgtgaatcaaggcagaatccgccatcctgggggagggacaagcaacccactagaatcacctcttcggctcttcccgtgcaggctcctcactatctccttgtgttccgctcaaggtggcaagtgggtgtcagggaagactccaagggcgagacctgcccaggactctcaggcagggtccccctagctctggaccctgctccaccactgcccagccaaggtgtttattcatcattcaaaaagcacttattggctgggcgtggtggcttataccttacctgtaatctcagcactttgggaggccaaggcggggagattgcttaagcccaggagttcaagtccagcctgggcaaaaagcaagaccgtgtctctacaaaaaatttgaaaaactagttgggcatggtggctcgtgcctgtagttccagctactcggggggctgaggtgagaggattgcttgtgccccggaggtcaaggctgccgcaagccttgaatgcaccactgcactccagcctagacaacagagcgagaccctgtctcaaaaataaaatgtatttattgagcacctgctatgtgccaggtactgctgcaggagctgggagggaaggctgacaataaacatacataaaataggcatattagctgtgctgtccaatacaatagccattacctgcaagtggctattaacatttatgtttacatgaattaaaattaaataaaatttaaaattcaggtcctcagtcacatttcaagtgctcagcagacacaggtgactgctagctactgtactagctcagttacaggacaccctcctcatggcagaaagtcctgttggccagtgctgatgatggcgttggagggaagggtggtttgaagtgccgggtttaaatgaggtggtcagggcaggcctccctaaggaagcggactttgagcagggtcctgtggcaggagagggagggagccatgtgagggaaggcagttccaggggagtctgaggaaagggtgttccaggcagaggaatcagcaggtgcaaaggtcttgaggtggaatctcaactgggatgcctggggaaggagctgaaaggaggccactgtggcaggagtaggagcagggagtcaggcagaggccaacactggagggaatggcctcccatggaaggccctgtcagccatctggagtgcagtggtgcgttcaaggcttgctgcagccttgacctcctgggcacgagcaatccttttagctgggcatggtggctcatacctataatcccagcactttgggaagcagaggcagtgaggactgtggctgttactgtgggtaggagaacgccctgggagagtggtgagtagagcagggacagggatgatttatgttttgtcaaggtacgtctggctgctgtgtgaaaatagcttgttggggaggaagagtggaagcgggaggccagtgagggttccccactgttgcaggtgagagaggatggcagcttggccccaggaaggcagtggaggtggggagaaggggccagattctggaggtgtcgggaggcaggacccacagggttccttgaagactgaatgtgggaagggagagtggagggagggagcccagggtgactagtttctgggttgatcccctggaaggagggggtggccctcacggtgatgtgggggagggatcttccttccaggtgcctgcattgcctcttacttagtggggataagaagggtcacagctttgaagtgggctatgtgtgatggcgccccacaccatccctcgcaaatgttcaggaactcagacatttattcctattaactaaccaggccttgtttacagaacagcggctgggacttccaagcctcagcaagcggggagcctccatgagctgctttctaaacccttgaccttgaggattagggacatctcaaacttgctctcagcccagaaacccactgttcaagtagggctgcacatggaaaccccatgagcagaggagaaacggcagaagtttccagatggagtcgtttgtcaattcgcatcaccttcggtatcctggggacagggggatgagagaggtggccccagagcaggggcctgaatctaggatttcacctcctagcccaggactccctcttcctccttccctaagctgagctggggtggtgaggactcccggggctgggaatctgcccctctgggccaggggaccctgttaggttgcagcagccaggagggacagggtgggggccaggggattgacagccacaatgttcctgggtgacctgcacgttgccaggcgtctttccagggcgataatctctcctgagaagaggaaagaattctaattacatctcaggacaatatttgtttggggagacgggagacagaacatatggtggggaggggcgctgggccacatgaagtggggatgttttctcatttacctggtgggatggaggatgacggatggggcagggctcctgctgggccaggggaaccgtatgccctgggctgtggtggagagctgggctctgcatggggcaggaggcaggagtggctcccacctcaccctgggtgccctgagatggtggagaattccgtacccattccatccgccgagcagctgctctgcgcccgcaactgccagcggcaggagctctgtgtccctgtcctcctggagctgccgcaggcaacagggcagggcaggaggtgggggaccttctcgggatcctcaaggaggacctttcggggggtgacatttgagctgatctttgccagatctgaaggagccagccgggcaaagaggggtggagggaagggcattccagaaggagaacagccagagcaagagtgaggccagaaagggaggcgtgtccacaggacagggaggaagccaggggaatgggtgctgatccccatacctggggtcccaggggagggttctaagcaggggagaggccacatctgatttggttttgcaaagatggcgctggccgctgtacatggatgctggagtaactcaggaggggaactgagctgggttactggaagaacctggaagagctgatggaagcggcagctcctccctggccttcttgctgtccacatccagcccaggccttctctgatccctggcatgttctcccacagcgcccggctgctggtgtggctccagggccgacacctactccctcatcgccatctcatgttggctgctgcacacacccttggcctgccttgctgagcttcttgggtgcccagctgaagccagaccactcccaccagcgggcttgcaggtcaccccaccccctccacccatcccccgccgtgcagggccagctgttcctacgttctccacctccttcacccactagccccgtggtttcctgagccccgccattcttccccctgtttcttgcacagccctgttcacagagacaccccatgacatgacagcacggacgggcgaggacgtggagatggcctgctccttccgcggcagcggctccccctcctactcgctggagatccagtggtggtatgtacggagccaccgggactggaccgacaagcaggcgtgggcctcgaaccaggtaatgcccctggggagatgcccaagctgggctggggaagtcctggtccctggggtaggggtatttctctgcccctcttctcctctgagggatatgggctccaacgctgttctccacaccacacagctgtctccctcccttcttcctcctggggtgggggttttaggtgatcatggaggcttatttgggggaacgggcaggaggcagagctaggctgagcacgtgaaatggccacagcaaggagggccttccagggcacagagggcctcccttcggggtacaggtgaggaaactgaggccagagggacaagctggcttcaggttatggagcaaggtgggtcttgtgactcacttcccaccacttctccgggccacacgggcagcctttttataaagagctctgcaaatgctgagttcactcacaggcacacacgcatacgtgcaccaggctcccagcacacccttggctgcacatgtgctcacccctctacacgtgcatgctcgtatgtacacacctgtagagcagatgctgtgggggctctgccccatgcctggtgtgcagcgtgctctgggaccagccaactgccagctcctctggctctgcttgagggttttctctggacacaagagcctgctggccatcaaggcaagcaggaggagcaggggactcaataggcaggagcagcccccaccaatgacccgcaaagttggaggatgaatgcctcagctccctcgcccttagctgggacaaccgaagcatattcttcactgtttcaccaagtgcccagtgggacgaagctccaattgcctactgtggtaactaaccaacaacataccccccattattaactttcttccctttttcgtttcactcaccttctcccctacttgtgtttcctgggatcacctcccaaataaactacttgacctttgtctcaaggtcagctcttggaggaactccatctgaatcatttgcatccttacacatatgtatacactaatgaacacgcaaacatagagatctgcccacccattcgtatatgaacacatatatctgcacacattcacaaacacgcattggcacactcatacactccccatgttcatgaaagagtgtctcacatgtgcccaagggcatatcaaactttgtcttgctcctgggggtgtcagctccctgacacttccagccctgccacatgcaggcttagaggacttcagtggccagagaaagcccttaggcaaatcgttgcaggtatctgcggttggaagcttccagggtcagtttgcaaaggtggggaatgtgggcagggttcccacagcgtctgcacagacgttcacatgggtgacacacctgaaggtacaaacacactctcagagtgactcaagggtacaaacatgctcctagcaacataccaagccaatgcttagatttctgcctgttcacactccctccaatatataccaaagcacccttgtgtatctaaatgcacaaatgtggtcagttttctacatacctccattatcttcttttgctctgacctcacctcctcccctgagtggatacagaaagggaccccaactccagactccatggcccccgagcctcatctgctgtcgtgagaatcttagcggttgtccgtatccctataatgtgtctccccacactgccaccccacccccaccctgtgctaacaccttgtctctgctctctccgcccctccccgatcccaacagctaaaagcatctcagcaggaagacgcagggaaggaggcaaccaaaataagtgtgagttttgataatgacttctcgaaagggctctaatggagggcacagctgtgacttaaaaaaaaattggggtccagttcagcagggagcttgggcaagaagatggaagagaagaaaaagagaagggaaaaaaatggccttgctctgttttttaaaagccggagatttttcaagttcattcaatgatgggcacaaaaaatgacaggggagagaagatgcattttctcctgtcagggccaaggctgtgtgcatcctggtgccttcgtgcttgtctcagcagcattttttatttggggaaccaatgaggtctgatgagcctgagccagctttttttggcctatcatgactgactgagtgttacgccatctcagggtcacttggtgatctggccccggggacggggtgggggcaccctagccaaaggatttcaggactggccaggccttcttatttattgactcatttgtcaatagccacactctgtaagaagggccaagcattcacccattttgcaggtggggcagctgaggctcaggaggtcagggacttgccagaggtcacgccaagggtgactggtgttgctgagctacctggcttcagggctgaagctctttgtcaccaggctgtgctgcaggccagtgcagctggggcccaggggagttcagggagtgacggcttttgtgaaggagggggcacccaaagccagtcctgggagaggcagacaggagacaggaggtgaactggggagagaacatggagtggaggggacctgcccagggacacatgtggccatgcaacgaggcaaggtttgtgcatggggcgtgaggtcagcttggcaggggcgtgaggcaagcctggcaggaggctagacatctaccagcaacacactcagaaaaggcaggtgcccgtgggggtatgaatgtgcgtgtgtgcgtgcatgcttgtgtgtttgtgtgtcctcgcatgcgcatggcggggaaacctttctaaattcacccttttttgcttgattcttccacaacttttcaaggacttgtaggggagctcaggaccccaaggccaatttgacagggatgagcagaggagctgcacccccaaaccgaggtcaccatgtggagaatgggcacagggagtcattggggtgccatgtcgggcatcagaggtggcatcatggaggcagagaggccagggaggaggcttctgcagccccttcaggcgggagggggtgggcaagagagcaaggatcttcaaagcatcatttgtgctgtctggcccagggcacagttggggtctgaaaattcaagccatttttatccagctcagggtggctgtgggtccacccccgaccctctgccaagggcgcatccatatcgaacaccccgtttctggcccaaatacccatccgttaagcccaggcaggtagatctgtgtgcatattaataccccgttcatcacaaccctttctcctataattttgcctggggtttaaggagcggctctggcaaaggagagaataatctaattgatttagaggattagaattccaggctgctgggtcccacatgagggaaatgcgacaatgctaattagttaaataaaataaatgtgctcagcatgaatgtgcaattacccccagccccccacccccagcccctgcaattcctgcagcagctggggctccgagggtctggttaggaaatgcacagacaggcatgggccaagctcctcgtgcagacagcgccacaagaaaaaccattcctaatacacaggtactccctggattcctgcagtctgaggaggtggcccaaacttttctccatggccttcagaactctgcacaattgctctgcccaccctccagcctcacctcttgcctgacctcaccccccttcccctcccgaccctggcagcctttccaccttcccattccttcccacctccaggcctttgcacaggctggtccgcctgcctgcaaagctgttcctctctctcttcccacggagctcagcttggggaagcgtcccttgaacttgtgacccagctggcgcccctcccatttccctgctggctgtatttctggttgtcgttatccgcttgtgtgagtttttgcttcatgactgtctcccctagagatgaggggtgctgggactgagcctgcctgactcactgttgcatttccagagtctagcacagagcctggcatggtgtagtaggtacccaataaatatttgttgaataattatcacacacacagacatacgcccaggccaatgtgtgtgtgaacccatacacagatttttttttttttttttgagatggagtttcactgttgtcacccaggctggagtgcagtggcgagatcttggctcattgcaacctccgcctcctgagttcgagaaattctcctgcttcagcttccccagtagctgggaatataggaacaggccaccatacctagctaattttttttttttttttgtatttttagtagagacagggtttcaccatgttgaccaggctggtctcgaactactgacctcaggtgatcctcctgcctcagcatcccaaagtgttgggattacaggcatgaggcaccgcgcctggttggtgtggatcccatgtctgttcacatatgcgtaccggtgacatgacgtgaacgagtgaaagagctcctgcgggggcccgggaaacccagaccctgtgtctacagggaacagctgagccaggcagggacctaggccccatattcccatgacttctaaaaatcccgattttagtggaatgtctcctgagtcttaactgttgggacctaattagatcttttgaaaaacactgtctaagccaaatagtgcagtctacaggctggtggaatcccagaatctcatagggagatcatttacgtcagaggacaggcatatgtgatcaaataataatggtccaaggttgagggtaagaaagtgctgtcagcttccaggggcttggtgcggggagggcttcgtgaacctgcctgggtggccatgttagccttgtgaagattcagactctaagagtcggctgtgctgactgccaggcggggaccgtgaggacacagtggggccagcatttagtgtcccaggagctgagtcctggttccagctctgccacctcctcgactctcccttttcctcagttagctgttgttgaaggcatatatgaaaacgctttggaaactgtaaagtgccatggattaggctatgtgagtgacagtggttcctagggtggaaacttgttaacgtgaatttgtgactcgtaaaactcctattcctagcaagcgagcaggatgtgggcaagggaataaaaaaaaaaaatcagatgctgggcgcagtgcacacctgtaatcccagcgctttgggaagccaaggtgggcggatcatccgaggtcaggagttcgtgacaagcctggccaacacagtgacaccccgtctctactaaaaatacaaaaattagccaggtgtggtggtgcacgcctgcagtcccagatacttgggaggctgagatgggaaaatcgcttgaacccaggaggcagaggctgcagtgagccgagatcgcaccactgctctcataaggagatcatttacgtgggaggacaggcatctgtaataaaataataatgataataataatatagcagctaacatttattgagtgcttaccatatgttaggagccatgacgagcactttatatgaattatctcgtttaacttgggcccagggaaggaccctggcctaaaaatatctcccttggtagcttgcatctgctaaggattccaccattaggtggaatcatttccatggctcaggcaaacatttctgcttattggccattttcaagttctggaagtttttctttcgatctaactaaagtcatttgtgctaaaattgaggttaattttccccttaaccagttttgcaaaccaagatagtccacaacttcctaattttaagacaaggtgaaattctccacaaataccctccttcctgggggacttcatcactgtaaatcgctcgtggttggaagctgagttaaaccaagatgactctggaaagaccatggtctcacacatacacactcctgccctctgggtgctctcagtccactgtgagagacgggtgttaatccaataatcatgcatgataaaaaatacaattacaactgtgaccaaaatgaggagagctgccataatggggtatctgatctagcctggggggccaggagggcttcctggaggaggtgctatttgaagtgagcactgaggtgtggaggatttgacaaagggtggggaacttggctgggtgtgtgcactggaggaattgctagtggccgatgaggctgaggggcaggccgggatgagacctcaaagggccttgtcagccaccgtggggaccatcaaagagtttaagttagggacattttgaaaaaattggtctggctgttgtggaagaagaggctggaaggttgtgtagatctgggaggaggctggggtgatggcctgggtgggagaagccctggaccttgcttttgccagtgctgagggatgtggattctggagagaaggggaaggggtccagtggtgtttagaggaggtcagtgggttcaggggtggagtgtgcagagtgcagaaagaaaacagaaatggtgattgcagagtttggctacagcagtaaggccttctggggcccaggtctggggagaacctgagttgggttctgaacatgctgaggggccagcgaagtgctgggtggagctgatagaggctgattgcagggcccagcctggggcaggaggcatctgacccctattcctcaccccagcaccttccctggggcctccacctctgccaggaggccacgtgaaggcaagggttggcatcacgagtacaaatccattcttctggcgtggctggaagacgatcccagcctgcccaatgtgagctggcctcggagtatccctgcagtgcccggaaaagcctgagctgtggggcaagcagggaggaggctgaacttggccctggccagggttcggccttgtctctttcagcgtaactaggtgcttaattgcactgctaaggcctgtcgatgcctgtgcggaggtgattatgatttacagctgggtcgccatgcgggggtccctttcttcgtgggctctccagtcgccctggagggctgggctgaagggctttctgcataatgtgtggtggatgaaatccaacgggctgctcctggagtgggatattgggccccctcccgtgggagaggcctctgatgaggtttggggctgggttttcccaagacatggaggattgggggcctcggaaagacatgagaagaccgatctgtagtttattgttcagaaggctcccagaggggtgggtaaggtgtggcctctgtcaccagctgggtgaccttgagaaaatcgcttcacctctctgagtctcagtttcttcacctgcatcatagggttattgtgaggtttaaataagagtgatgaagcttggctgggcgcggtggctcacgcttagaatcccagcactttgggaggccgaggcaggaggattgcttgagcccaggagttcaagaccagctttggcaacatagtaagaccccatctccacagaaagatacaaaaattggccaggagtggtggtgcgcacctgtggccacagctactcaggaggtcggagggggtgctgaagcgggaggattgcttgagcccaggaggctgaggctgcagtgagccatgatcacgccagggcactccagcctaaggtgacagaacgagaccctgtctcaaaaaaaagaaaaagaaagaaagaacgaaagaaagaaagaaagattgatgaaacttatcacatcatctcacagtgatcaggcacttcataaacattagccactggcactactgttgctgttattatttttattaaaaatatcgtatttgccttctccagattgtgcttagaggcatggaccacagggactgggagggagtcgtgtctgacatgtgtccttgcccttcatcctgttggaagttcactcgctgagttgcttgattatgggttaggggtctaggttctccgttagactgtcagctcgtgccagcattaccaggatctggctggcccattgtggtaggcactcgctaagtgcttgttgaatgaacggacaaatttagcccaagaaaaccgaggccagagtgctggtgacttgtcacggtcagcgcctggcctcccatccctccctgcggtgctccctgccctcctcctctctgagagaggaagagctcgtgttcctgaaggccacatctgtctcttggcagagggggtgacagggaggagggagctggctgcctggggagccgtccaggccttcgtggccccatctaggggatgggagtgggtgggccgagggctgggcctcgcttggtgctccctccctaggagcgagtgctcccagcactttggattattactccattagcgccttgtagggttgacaaatgaaggataattaatatccgtgagggaagcagatgttgaggtaattcgctcccgctgcgcatttgcaacagcatctcctaactcgccagagagagcacacaggaccacagggtggaggtgatggagtcagagggacagggtgggctccagcagggcctggcactagggagggggcacccccacagccagaggggcagctgggagggtttcccactgcttgccatggggaagtcctgcctgggtcccacctccgtgcctctgctgaaggctttccctccacgtaggggacgatgggcagcagggaaggctcagcatgagggaggaagatcaggctccctgctgctggacactctcttcttcccttccctgtggccctgccagcactggtggccctcggtgagcctgtcacaccactggaagggtgagagcgcatggagcctgttcccagttccgccactcactgactccatgcctctgggcaagtcacttcttttggagcttcagtttcaccatctgcaaagtggatatcgttatgtgtattcaccctgctataaagaactaccagagactaggtaattcacaaagaaaagaggttaaattggctcaacgttctgcatggctggggaggcctcagaaaacttagaattatggtgtaaggctaaagggaagcaaggcatgtcttacgtgttggcaggagaagagtgaacgaaggggaaactgctacttttaaaccatcacatcttgtgagaactcactcactatcacgagaacagcatggagaaaactgtccccatgatccactcacctcccaccaggccccgccctcaacatgtggggattacactttgagatgagatttgggtggggacacagagccaaaccatatcatcatgcgcatgtgacttacaattagaaagcaagacatctgagtatgacttcagttggagaaagaaggtcatggggtgggtccctgcattcaacaaatgttgatgattatttacggagtgctgggctctgtgataaccactcacatggacaaaataaatattgtccctgctctcatggagggtacggtttagccagggagagaacccaaaatcaagtcaacagacaaatacacggttcaaaatgagaagactgctatgcaggaaataggagggagtggggacagggggtcaatttcttggaggaggtgacatttaggatgaatgggaaccaggcaggtgaagatgaacagggaaccccacccaggcagagggcccagcacgcgcaaaggccgtgaggtcagcaagagtttcccattggggtgttgacgaaagagccctccccagggcagattggtaagacgattagaagtcacacgtgtgagtgcccagcacaggctcagaaacatctgcaggctgcatgcagagggcgcactttctcatcctggccccctcactgcaggggtgaccagcaggggcatcccacctggagccagaagttgggcttccttctctaggagctggggcttggcaggaacaggccagctcgttgtccctccagaagagacagaccagtagtccacaggtctgaggcccactcacctgagcctacaaagctgtctgggaagggggtcagtggctggcagctgagaactgatctccactgttctgtccaggcaggacaggggctgcaggaaggtttttttttttttctaagaagaaggggccaggaaaggaaagaagccccctcccaccaccaccacccctctccataggcccaactcctttttttttttttttaatcttttattttgagttatagtctcaggaaaagtttcaaaaataggtcattaagtctcctgtacccatcagccagcttccccagtggtgtatcttatgtaactgtccatctgctttttcttttttaattgaaaaaacacccacagcaactttatattcagggcagatttattcataagagctttaatctggaaatcacataaatgtccatcgacggtgatcacataaacaaatcgtgcagtatgcatgtgatggaatactatacagcaatgaaaaagaacaaatggatggctgggcatggtggcttacacctataatcctggcacttcgggaggctgaggtgggttgatcacttgaggccaggagttcgggaccagcctggccaacatggtgaaaccccatttcaactaaaaatacaaaaattagctgagcatggtggcgggtgcctgtaatcccagctactggggaggctgaggcatgagaactgcttgaacccaggaggtggaggttgcagtgagctaagatcgtgccactgcactccagcctgggtaacagagactctgtctcaaacaaacaaacaaatagatgcaggcagcaacatggagaaatctcaccgataacaggttgtgtcgaaaaagccaggcacaggaaagaagccacccatacaagagttccaaaacagaaaaaaacgaatctatggtgatagaagtcagtcagaaagcgggggaccccagagggggagtattgctcagtgaagggtgtgctctagggggtcacgagtgttccatgctttgctctggatggtggttacacaggtgtacacacaggaaacatttcctcaggctgtgtgcactttactctacataagtaatactcccattttaaaatagaaatgtaaaaacccaaccaaataaaacaaaaagtcaaagtacaaagacgaatataacaaacatccttgctccccccaagtggagtgaatagttattagcatcctgatatatttgtcgtcagcctttatattgttttgttttgttttttattatgttattttattttatttatttatttttttgagacggagtctcgcgctgtcgcccaggctggagtgcagtggtgcgatctcagctcactgcaacctccgcctcctgggttgttcaagtgattttcgtgcctcagtctcacgagtagctgggattaccggcatgcaccaccacacccccggctagtttttgtatttttagtagagatggggtttccccatgttgcccaggcaacatgcccaggtctcaaactcctgacttcaagtgatccgcctccctcggcctcccaaagtgctgggattccaggcatgagccaccgcacttggcctggtttggtttttaaaagaccggtctcactctgtcacctaggctggagtgcagtggtgcaatcacggctcactgcaagcctcaaactcctgggctcaaacagtcctcgcacctcagtctcctgagtagctgggactgcaggcgcctctatttttttttttttttttttttaggaaatgtaaactttcagactaaacgaagactttgctttgtagcctacaccaggtccacttcctcccctgtgttctgccctagggtctaccactgctgtgaggaggccccgttgttccctcctgtctattttaaacttccacacccggaagaccccaaaaccagtatagagtaggtgtctgtgtttgtttacataaatggcatcccctgggggtgggcagcagtgagagctttccctctgctgtttgccactgagctcacgtgcctagttctagctccgtctttcggaccactctgcagtgcttcatgcagggaaccggccactgcttagttatgtggtctgttggtggacatggcagttgcttttacttttttgctatttaactcactcttgtgcaaacctcggtgggcccttgtgggagtgtttctggggctcccgtcctagcatgcgatcttgggacccccccccccgactcttcttctcccccactgtcactggatggacaggtcacggtctctctgtcacccccaggtggtcaaggtggtgggcagcaacatctcccacaagctgcgcctgtcccgggtgaagcccacggacgaaggcacctacgagtgccgcgtcatcgacttcagcgacggcaaggcccggcaccacaaggtcaaggcctacctgcgggtgcagccaggggagaactccgtcctgcatctgcccgaagcccctcccgccgcgcccgccccgccgccccccaagccaggcaaggagctgaggaagcgctcggtggaccaggaggcctgcagcctctagactgatgcccctgcccccgcccatccgcccccacgctgtacagagtgcatgaggagccgccggaccaccggggaccgactgcctgcgtccagccgcgccccatccccgaggccgcctgtggccaccatgtcggccctctttccaccaccccttgctcagcatgtaagccccacccacccctgccctttcagacccctgcggtgacctggctcggagaaggtggccctgggcaccaaggggccaaccgccctgaacactggggcagggaccatgctggggcccggggccacccccttcctgtcaccagcttctgtggagtccagtgttttgctttgcttgcttgtcccccatcctgtcctgagccggggccccccagcctcgcctccctcctcctaccatccctcacttggacctgggggtgtggacagtgacccctccctgaatatggacttgaatcttctgagcagaactagggcctctcccctggtgaagacccagggaacccaggagggcccttctggggcagtggctctgcagggtcactcatggaggcctaggggaacagcgagatgccccaccacctcctggcgagtccttcctgttcagctccctgtgcgaccctccagggatgcaggggatccaggattctctgccctgtcacacggcgagtcagaagggaggggcctttccctcggacccatggccccaggcagagttttgcaccagcaggacccctttgagggccttcaaggctctcccaggagtccccctctgccggccccccaatgccccagctccctcttgggtcctgtgccaagtccgccccagggcctggggctgttgggagccaagggccccctggtactcagttccctcacgattcccgatcacgggcacacctgccccctggttatttgtaaatatttctattggacccaattctcctcggaattggctggcacctctggctgccgcagctcagtgatgacgtgggggaggtgggagaggccgagggctttgcctaggggtgggttgccctgtatacatgatccagtctgtgactaccagccaacctgaataaagcggttttaaaaaaacctctgggcagtgtctttctggggcatttgtgcctggggggtgtgtggggtggaggcaggagagcaggtggctagctcacacccacgcctcactcagcatctctctcctgctttgcaccccaagcagcgcctggctttgcagtgcagagcacaggaccggtgggggcagagggagagggtgggagacaaccagcttttgttcagctccaatcctgttaccaggcactcaaattattctttgcttctgagataatcacctacagagaagactgcataaaacatgtttacacagttttgtaaataatgtaaagcaaatacttgtgtagccactacctaccaaacatagcaccccaaaagagaacctccccaagcctgatgtgtcatttccatctatcccttctcctccctcttagaggcagccactgtccccacagttaaggtaatctcattcttttttttttttgtttttgagacggagtttcgctctgcaacccaagctggagtgcagtggtgcagtctcggttcactgcaacctccatctcctgggttcaagtgattctcctgcctcagcctcccgagtagctggaactataggcatgtgccaccacacctggctaatttttttgtatttttattagagccagggtttcgccacattagccaggatggtctcaatctcctgacgtcgtgatctgcccgcctcagcctcccaaagtgctgggattacaggcgtgagccactgtgcccagcagttttttttgtttttttgtttttttgtatttttagtagaactggggtttcgccatgttggtcaggctggtctcaaattcctgacctcaaatgattcacctgcctcagcctcccaaagtgctgggattacaggtgtgagccactgtgcccagctgataatcccattcttaatgttctttttgtagtcttactacctatgtgtatgtccttgtatttattttttattttaagttccggggtgcatgtgcaggatgtgcaggtgtgttatataggtgaatgtgtgccatggtggcttactgcacctatcaacccatcacctaggtattaagcttggcatgcatgagctattttcccactgttctccccctcccctgccctcccctgtgtatgtcattttaaacaatgtatgtgagtttcctccattgtctgacctgcatatgcacagaatcatactgtatttctcatgtcttatatttgtgagattcatctgtgttgctgcatgtgtctgtaatttgttcacctttattgctgtataatatttcactgtatgactatctcaccatctatcaacttacttatccattgtattgctgacaagaattggagtgtgttcccgactgggtactatgacttaccaacaacactgctgtgagcacactggtcaggatctcctggtgcacatgagcctgagattctcctagtggatttatcaggtcagaggcttaggcactttactttggcatctcattttctcttatgaagtatcaacaaccccttattccagttgaggaaacaggctcagagaggttaagtagcttgcccaaagtcacagagttgttgaactcagacctcccttagccgtaaagtctgtttgtcttgtttctgccaggtctggaccacctccccggtccctgccatcccatactacaccctgggctcttgactccctttggcttattctagccgagtgtcccacccactatggtcctgctgagaatctgcctgaggatgtgtccacctggggctctcaggtcaagccctcatagccagagtagccatctggtccttgctctgcaacatgcagaaaccacaggcaccccttggagattgggaactgttgaaatgatgattgaccttggccctgggccccgtgtcccggccctgtgctgatcaccacagtagccctgaagcaggccttgcatcctctgtcttcagatgaggacaatgaggttcagagaagggtgggctggagaatagatggatagatagatgatggatggatgaggacatgaataataaccaggctatgaagtagtcaggactctgctcctgcagcagaatccaggtatgccagggatagatggtcttatgacctgtggtcctctcaggccactggctagcctgaactcaatgaatatggtctcttccagaaatctccacatacaaggctggttctggaaggcccaggtccctctaggagggtgtgggaggatctatgtcatgctagagtgataacaatactcaccagccctgagcacctcctatgcaccaggcactagtgaagggctttccacaggaagttctgatattccacagggtctcatccaaccctcccaagggtctttgtcccatccctggccattttactcccatagaggggtccccccaacctccttagagggatttttcttgttccactgggaagacagacaaaagaagaagaaggtgcctgggttagaatcctgcttctgcccatctttgccccatggctgcaggcagggctcttcacctctctgagcctcagttccctgttctgtaccatggggatgctcctggggaagtgcaaatcaaaaccacaatgtgttaccacttcacacacatgaggacggctggaataaaaaagacaaacactaacaagtactggcgaggatgtggagacattggaaccctcatgcactgctggtgggaatataaaaggatgtagctgctttggaaaacagtctggcgctcctctcaaggttaatcatagagttaccaagtgactgagcaattccgctcctaggtatcagcccaagaggactgaagacacgtgaccacataaaaacctgtgcctgaatgtttatagcagcattatccataatagccaagaaatggaaacaacccccatgtccatcaaataatggatggctaaataaaatgtggtatatcagcctgggtgtagtagctcacgcctgtaatcccagcactttgggaggccgaggtgggcggatcacgaggtcaggagatcaagactatcctggccaacatggtgaaactctgttgccactaaaaatacaaaaattagccagatgtggtggtgcacacctgtaaccccagctactcagaaggagaagaattgctgaggctgaggcaggagagggaggctgaggcaggagaatcgcttaaaccagggagttggaggctgcagtgagccaagatcaccccactgcactccagcctggagacagagtgagactccgtctcaaaaaaaaaaaaaaaaaaaagtggtatatccagacgatggaatattatctggcaataaaaaggagtgacattctgacactacatgctacactgtggctgagccttgaaaacacggtgctaagcgaaagcaaccagacacaaaaggccacatattgtgtgattccatttatatgaaatgcccagaataggcaaatccacagagatggaaatcacattggtaattgcctgggactaagggagaggagagtgggaagtgactgctaatgggtgtgagtttcttttgggggtgatggaaatgttctaaaattgattgtggtgatggttgcacaactgtgtgaatatagaaaaagccattgaacgcacactctaagtgggtgaactgtgtgggacgtgaatgatatccaaataaagattctaaatgaaacaagatgctcctgaccacagtgcccacatcggacatggggagacgcttagggaattctggcttctattaaccttgccgtgatctttacgtgaagccagagcgaagtctgcctgtcctcaaggcgcagctggtgggagtggagatgggagcggtagagaaacatgagctgggggagggaattccttttttgtttggtttttgagatggagtcttgctgaaacacccaggctggactgggatggtgtgatcttggctcacagcaacctccacttcccgggttcaagcgattctcctgcctcagcctcctgagtagctgggattacaggcacaactggctaatttttgtatttttagtagagacagggtttcactctattggccagggtggtctcgaactcctgacctcaagtaatccacccactttggcttcccaagtgctgggattacaggtgtaagccaccgcacccggctgggggaaggaatttcttaaagggagtccccaggccctattcagaaggctcagaaaaacctcagtgcacctccagagtagctgtgggccgctttcccctttgtgcccagcataagaatagcatgggccggggggtgcttgttttaagttcagatgtccagaccccatcttggccttcagactcccacctgccagcacctatagttaactagtggccctcaagatgacaatacatcttggtgatggttccacgtggaatttttaattgctatagaatattccattttattaggctgttcttgcattgccataaagaaatactcgagactggatgatttataaaaagaaaagaggtttaactggctcacagttttgcagggcttataagcatagcaccaacatcatcttggtttctggtgaggggctcaggaagcttccaatcatggcggaaggtgaagcagaagcaggcacgtcatgtggcaacagcaggagcaagagagcgagtggggaggtgcccacatttttaaacacccagatttcacaggaactcacccttgcaaggacagcaccaagccattcataagggatgtgccccaatgacccaaacacctcccacctggccccacctcccacactggggatgatatttcaacatgagatttggaagggccaaatgtccaaactaatatcacccattacatagatgaatgatgatccatttagccagtccccaaataatgaacattcagcttgtttccaatcttgccctattataaacaatgttgcagtgaatttcgtagatgataaatctgttcatacatatgcaaatatgtttgtaggataaatatctagaagttacattgctgagtcaaagagtcatgcatttcatttttaacgtttaagtttttgaggggacagggtcttgctccgtcacccagactagagtgcagtggtgtaatcacagctcactgcaacctcaacctcctgagctcaagcagtcctcccacctcagcctcctgagtagctgggaccacaggcatgtgtcaccatccccagctaattttttgattttttgtagagaaggggtcttactatgttgcccaggctggtctttggcaatttggcaatatcaaccaagagtaactggacaatattactcttgttatgagaataacttgttatgagcttgaaccacggcacccggccaacttgtgcattttaaatcttggtcaatattgccaaattactctctacagatgcagggccaatttatactcctacaagatatatgtgagaatgtgcacctaatccctgactcccccagtctcttcaaccccagaatcaaacatgttggtgcagctctctgttggttaaaatggaatctttttttttttttgagacggagtttcactcttgttgtccaggctggagtgcagtggcgtgatctcagctcacctcaacctccacctccctggttcaagcgattctcctgcctcaacctctcaagtagctaggactacaggcatgtgccaccacgcctggctaattttgtatttttagtagaaatggggtttctccatgttggtcagtctggtctcgaactcccgacctcaggtgatccgcccacctccgcctcccaaagtgctgggattacaggcgtgagccactgcgccaggcctaaaatggaatcttacagtggtttcaatttacatttctcctgggagtgagattggccatctttttgcttgtttaagaaccaaaccacatgtgctccattttctgtgaactgacacctcataatctttttactggcttgttgattgccatcttattgatttgtaggagttcctactgagatgaattgaaaactttttttttttttttggtcttttggctttgtttacagtgtctttttgtatttgtcaagtaaatgtttttaattgttaagtagtttgtacatattaatcttccattttatcatttctgtgtttcctttcatttatataaatgtaaatttgatccttcaggaattgaaattgttttaaggtatgaggggggacccaattttattgttttctagattttaaactttttctatctcatcttggcatgatttattttttccccactgatttgaaatgctaccattattatattccaagctcccacataaatggactacttctcaactttctttcctactcctttgatctcattcataggtcagtaccacactgtttaaattattatagttttataacttattttaatacattttaaggctgtttttgactccactttctgtttaatttttatttccacaacttgcctggattcatctttgcttttccatgtgaactagaataatcttatccacttaaaaaattgtcatttcagttgggatcatgttaattcataaattaacacaggaaaaacttatatatttatgacaatgtcttttttttttttcttttgagatggagtctcaccctgtcacttaggctgaagtgcagtggcgtgatcttggctcactgcaacttccacctcccagattcaagccattttcctgcctcagccgcctgagtagctgggattacaggcacctgccaccacacctggcatttcacctgttggccaggttggtctcaaactgctgagctcaagtgatctgcctgcctcagcttcccaaagtactgggattataagtgtgaaccaccatgcctggcctataacaatgtctttctatgttgtctcaacattctcctccttggtactccctcttattttaagacttcttggctgggcgcggtggctcatgcctgtaattccagaactttgggaggccaaggcaggtggatcacctgaggtcaggagttcaagaccagcctggccaacatagtgaaaaccagtctctgtaaaaatacaaaaattagccaggcacgatggcaggtacctgtaatcccagctacttgggaggctgaggtgaaagaatcgcttgaacccgggaggcggaggttgcagtgagccgagatcatgccattgctttctgggtgacagagcaagactccctctcaaaaaaaaaaaaaacaagacttcatttttgtgcttctccaaagagtattttaaaaataagataaatttttgcatgactagagggcagtagatacgcatagatatgtgatagaggtatggattgataatagacagtatgtgtggaatatagaaaatgttaattttagaatcaaaatggtgagtataagaatgttctctctaccaaattatttcaacttttatgcatgtttaaaattttttataagatgatgcagaggagagagcatttagaagttttcttcctatcgccctttgtgatgcgccccttcatcaactaagacgcacccaaaggttaaggaaacagttacttaggggttgagggttcaggggctggctggcctggcaaaattttaaattcctatggctaaactgcctaactaacggagctatcagttctgatttacaacccagaccactgcaactctgactggacagaggatctgctttacaatcattcattttttgttttttgttttttgttttttgagacagggttttgctctgtcacccaggctggagtgcagtggcacaatctcggcttactgcaacttccacctcccaggttcaagagattctcctgcctcagcctcccaagttagctgggattacaggcctgtgccaccaagcctggctaatttttgtgattttcgtagagatggggtttcgccatgttggccagactggtctcaaactcctgagctcaagtgatccgcccgtcttggcctcccatagtgctgggattacaggcgtaagccatagcacccagcttacaatcattatcttctgataagcaactgcagaccttaagccagtttcagcagtttatagaggctgcagataccatgtacctggtgggggaaggaggaatcaggtgaaaaaccagtacaagcaatacaaattcaatacagtggctggacacataagttaaaatacagaaacaggcagggcgcggtggctcacgcctgtaatcccagcactttgggaggccgaagcgggtgaatcacaaggtcaggagatcgggaccatcctggccaacatggtaaaaccacatctctactaaaaatacaaaaattagcggagcatggtggcgggcgcctgtagtcccagctactcgggaggctgaggcaggagaattgcttgaacccgggaggcggaggtagcagtgagctgagatcgcgccgctgcactacggcctggcgacagagaaagatgctatgtcaaaaaacaaacaaacaaacacagaaacatactgtctttgtgtcctatacttcatcttttgataaacagagccacattccacttccttttcatgctaaaacccaccctagccgggtgcgatggctcacacctgtaatcccagcactttgagaggctaaggtggtcagatcacttgagatcaggagttcaagaccagcctggccaacatggtgaaaccctgtcctaccaaaaatacaaaaattagccagcgtggtggcgggcccctgaaatcccagctactcgggaggctgaggcaggagaattgcctgaacctgggaggcggaggttgcagtgagcacgccactacactccagtctgggtgacagagcgagactccatctcaaacaaacaaacaacccaccctaaagtgaacatgggatgtatgttatatgtatgcttacccattatgcatgcactcggctcccctcataaatacgtacagcttttcccctaaacctgctgaatatgtacaataccagcactgtgagtcgtaaaacccaacccgtacttctcctctttgaagagagggcacctttggcctgtgctagagactttctcttcctggtatgcaaactgatatcaccaataaagctttccttcctatttagccatcctggtggtcttgtgggtgacaccctgcatatttttgttgaattaattcctaaatactttttgttgttactattataattaactgttttcttctattatgtcttctaactcagcagtccccaaccattttggcaccagtgaccggtttcttggaaaataatttttccgtggaccgggtggtggggcacggggtggggtatggtttggggataaaactcttccagctcagatcatcaggcattcagttctcataaggagcacgcaacccagatctcttacatgcgcagttcacaatagggttcacgctcctatgagactctaatgcccctgctgatctgacaggaggcggagctcaggcgataatgctcacttgcctgctgctcacctcctgctatatggcccggttcctaacaggtcacaaactggtaccggtccgtggtctaactaattgttctttgtataactgtgaaggctattggcttctgtattttagcttacgtatcggccactttattgactcagtattgcttgcactggttttcacttgattcctccctcccccaccaggtacctgatatctgcaagcaagatgatctccctcatttctttccaaatctatatactttttatttctttctttggactaattgaattggccagtatctccaagacaatgttaaatgatagaactgctttagaacatctttgtcttgcttttaactttaatgagaatgcttcttttgtttgtaatgctgactttgaatatacttctggagtctcttgtgaatgttttaggagactcaaacccgattgatgaggcacacaaacacttcagtatgaatgttcatttcaagctggcaccatttaagccaggttctaggactatgtctgtactccccacctcaaccccaccccaccaccaccttccagacaaaaggaaaacatttttggaatgaaactcagtactttgccttagtcaccttcaggtgtagccctggaagccaacaggtataacatttagagcaggggctttggggtctgatagacatgggttcgaatcccagctctgccacctttgaggtatatggcatttgatccacttcctcccatttgaacttcggtttccctggagaatttgaggggacacggagctcagcatctagcacagtgaggctgctctcatttaccagcatggggagtgggacgagcagggcctgggggatctgcattaatgataagtttcttttttaaaattaattaatttatttattttgagatggagtcccactcttgttgcccaggctggagtgcaatggtgcaatctcagctcactgcaacctctgcttcccggtttcaagtgattctcctgccgcagcctcccaagtagctgggattataggttcacaacaccacgcctggctaattattgtatttgtagtagagagggggtttcaccatgttggccaggctggtctcaaactcctgacctcatgtgatcctcccgcctcagcctcccaaagtgctgggattacaggcgtgagccactgtgcctggccattaatgataagtttccttcatgctaaagtttgtgaggtattggaaatcacttgtgcataacaagtgactggaaaagacagactccacgctgagcactgtggtcatttctgagaagtgggatagaagaaatacatacatcctaggaggctatttgtaaagggcaaggattacatctgtaacttgaaacatctataaatatttaaagagaaccaatcgggaaacaaaagtaaataaaatgggggaaatgaaagaatgccagggttggcaggaatcctagtatgtgcaccatctggtgtctgagtccctttgacaatgtctctcccttcagggatgagatgcattttccttctgaaaacagcccttgctgacccgacctagagcagaccctggagctatgtcctactttgcctccagcctctcccaccctctccccaatcctaattctttttttttccttctcctcctctcctcctctcctcctcttttttttttttcttcttgatttagtcccattagtttaggtttttttcactcttttcagaccacttgtctcagaaaagacttgcctagtctctcagcgtgtgtatcttgattggtctaagccaggggctcttaacatgcagtccacagactacctcaaccaaggagtctgtggatggaatgcataggattcacaaacttggatgggggagaaggaaaagaagctacacctttattttcactaacatttaactgaaatttagcatttgcttctcttatgaatgtaaggaacaaatcatagttgcattagcagtacttgtgattttgtcaccaaaagaagtgaaatattttttcatatcacaaaacatttgttgcaggtatctcacagtattgtttacactcattgctgcttcaaaattatagttattagatcagctgctagattttatttaacatgctaataaagaagcatatttgttcctgtaacatacttttaaaaatatattttgaaaactgtattcaatataattagttttctttgcaattctatcattttgtttatttatttttcattttattttatgtagttaaaacagtattatgagaaggcatccatccataggcttcaccagactgccaacgggtccactaaacagaagaggttgataagccttggtctaagccaatcctacaatttcatttttcttgcttttttcatctttctttcatttttctaaggactggcttacaagtgttatatgacctgaggtgaaatttgagggcacatgtgctggaaggaaaagggagtccctcttggaaaaggtttcttgtgatctgaggggacatctgctgaagggaagggggagtccctcgtggaaaaagtttcttaacttttaaaaggagacacaaggaagacatgctttcctcctctgcttcttggtgtctgaccatgttaggctgggggtttcttccactgataggcacccatgaggagagctgctgacctactgaagacggcagagatgattgatgataaaagcctgggtctttgaggacacagttgagttggtggcttagccagacacagaactactctacctttggactcctgttgtcaatggatacatctcttacaatgaagtacagtttgggtcagttgtctgttacttgcagcctagagcaccttctctaatccatcatgctatttttgttgcccagtgttttccactcttggtcctatctctgggttgacagagaacaaagctggcatcttcttttatctgatccttactcagattggtcagatcttttttgcttgaggttgaacatcttcaggtccttcaactagactcaagaggcatggttttgagacctttatccatccctactacgtgtgtctatccaggtcagtggttttcaaactttagcatgcatcagaatcatgctgtttgttaaaattagcttgttaaaatgcaaacttctgggccccactgcagagtttctgattcagtagaactggagtggtgtccaataatttgcatttctaacaaattcccatataatgctgatgctgctggtgttggagacaacagtttgaaaaccactggtcagccgggtatggtggctcacgcctgtaatcccagcactttgggaggccgaggcaggcggatcacaaggtcaggagatcaagaccatcctggctaacatggtgaaactccgtctcaactaaaaaatacaaaaaattagccgggtgtcatggcgggtgcctgtagtcccagctactcaggaggctgaggcaggagaatggtgtgaacccgggaggcggagcttgcagtgagccgagatcacgtcactgcactccatcctgggcgacagagcgagactctgtctaaaaaaaaaaaaaaagaaagaaagaaaaccactggtctaggtccctatgaaaacatagttcctcaagataaaaccactaatcaagttcagcagagcagagctatcacctccttcaatactgatagcatgctcctattattgcaggccaagttataagctactttcttatgctgctgaaatctatgccaaccaaaactctgaaacctgtttcatacatgtggcttctaaaccctctctctgttctttaaataggggactatcacttgtcagtgcttatggtgtgctaagtgttttatgagttatatcatttgattctcacaataacctttgacacaggcgatgatccctttctggagagactggtaactataaaaataaagaaaaaaatcttaccaaagtcatccagctggtaaatatgtgacgggagcaggatttgagtctgggttatagaactctacaattgagaacattcctcctgcttaacagcatctattaatcagctgccctgcggggctcaagacaaatttacctaattgtgcctcatccagctcctttctctttcttgttcacagggtcattgcttgtgatttttgtcaaatgccccaggtttcttgagcctccattatctccttcatctgcaagtcatccctttcactgcccccacccctgctcccaagcagaaggtgaggcttgctgagttgcctttggagccacatgagtttggtttctgaaagtgttaactgtgggcacattttaataaaggccattttctaggctacatctatataaatgttccaatttaatatgcaaatgtaccataagtgatttagcgtgtgctgggtctttattgttctagttgcagttatgttgatttagcccatagctctatggttaataatttagtaagcaaccttattttttaatctccctttgtcctcatacctcatccttttccacattaagggacttaggcttgcattaaaattcagtttaatgaacaatcaatccttgaataagtggtagctacaaaagaactccatccaaatgctagggaatcctgtaagtttatggttttttaccttctttgtggaattcttgcttttatcataaatataatgacccactttatccctcctagtgctttttgcattatgttctattttgcctgacattaatattgttagtctagtcttctttggttagtattttcctgggatatctttttctgtctattttcagtatttctgtatgatcatcttaagtatatctcttacacaccacttacagctggattttgatttttaaaaatctcatggatagtctctaagaggcaagtttaatccatttacatttatcgtgattactgatttgtttgaactaattttctaacatctttctgtgtgtgtatgttttctattacagtgatattttggggggtggagggtggagggcatatgtggctactttaatttttttcttccttctttacttttgatggatagagctccttatcaccccatcccttttcctccctactgatttgaatgctatatatcaggggtctccaacccctggtactggtccatggcctgttaggaaatgagccagacagcaggaagtgagtggcaggcaagggagcatcactgcctgagctctgcctcctgtcagatcagcagtggcattagattctcataggagcacaaaccctattgtaaactgtgcacatgagggatctaggttgcgtgtttcttatgagaatctaatgataaatataatgcacctgagtcatcccaaaaccatcccccaacacacacacacccacccccaccagtccacagaaaaattgtcttccatgaatccagtccctggggccaaaaaaaactggggactgctgttatatatcacatttcttttagtggttttgttttaatttttaacatagttacttggctatacattttcccaacagtgtaaaattattcagtatctctattttcctcctgacaagacaatcccttgaacataatgtcactaccaattgaattcccctcactctgtcttcctcgttatttatttatttatttgagacagagttttgttcatgttgcccaggttggagtgcaatggcacaatcttggctcactgcaacctccgcctcccaggttcaagcaattcttctgcctcatcctcccaagtagctgggattacagccatgtgccaccatgcccagctaattttttgtatttattagagatggggtttcaccatgttggtcaggctggtctcgaactcctgacctcaggtaatccactcaccttggcatcccaaagtgctgggattacaggtgtgagccaccatgcccagctgtcttccttgttattgtctagaattctggttccactatttatcacaaaattgaatatgtatgtaatcagaaattagatttaccaatatttgaacactttctgtacttaacattttccttctttcacttttccttctgccaaagtatatgctttagtaatcctttcatgatggtatgggtaacttggtttatgaaagtttgaaaatgtctgtaatttttcttcctcagtgttcatttagctttgtattgaagtaggttgatagtatttttccctctgcatgttcatgatattacttctctgtgtatgccatcccttattgctaatgaaaaatctgttcagttcaactggcattcctttgtaggcaattggtctttaatctcttgtaactcttgagatttatctctttatctttgatttcatcattgcaatgttagcacatggtatgtgttttccgtcttaggacttttttattttgaaatagtctcagccattatctcatacatattacatctccatttcattctttattctatctttccagtatttctgttatgtatatgatgaaacattttaatctgttgactatgtcttagctgcactttcatgtttttcatttctttttctctctgtgttgctttgggtgaatttctcagaaatatcttttaattcactaattgttcccttaactgtgtcttatcccatttgatacttcaattataatctttttttttatttttaggatttctttttccttttttttcttttctttctttctttttttttttttctgagacagagtttcgctcttgttgcccaggctagagtgcagtggcgcgatcttggctcactgcaacctccgcctcccgggttcaagcgattctcctgcctcagcctcccaattagctgggactacaggcgcctgccaccacgcctggctaatattttgtatttttattagagacggggtttcactgtgttagccaggatggtctcgatctcatgacctcgtgatctgccctcctcagcctcccaaagtgctgggattacaggtgtgagccaccatgtccagccataggatttctttttgttttttgagacgaagccttgctctgtcgcccaggctggagtgcagtggcatgatcttggtgcagtctgagccactgtacccagcccacttttaggatttcaaatagtttctttttcacatcaacagttaattttgctgggtgtggtggctcacgcctgtaatcccagcactttgggaggccgaggcaggtggatcatgaggtcagcagatcgagaccatcctggctaacaaggtgaaaccccgtctctactaaaaatacaaaaaattagccgggcgcggtggcgggcgcctgtagtcccagctactggggaggctgaggcaggagaatggcgtgaacccgggaaacggagcttgcagtgagccgagattgtgccactgcagtccgcagtccggcctgggcgacagagcgagactccgtctcaaaaaaaaaaaaaaaaaaaagaaagccaacaaattcaactctgaacagatggattcattagtgataagtgatttcataaattcagttccagattgctccagataaataatgtggaactgactttaaaatacatttaagatcctagcaaaggtaaacgaaggaatgacttgtaaaaagagaaaagttatgaaacaaaaacagacaaaattaactgttttcttttggtggtttttttttttttttttttttttttttgagatagagtctcgctctgggaaagatactatcaacctacttcaatacaaagctaaataaacattgaagaagaaaaattaaagacattttcaaagtttcataaatcaagttacccataccatcatgaaaagtttactaaagcatatactttggcagaaggaaaagtgaaagaagaaaaacattaagtacagaaagtgttcaaatattggtaaatctaatttctgattagatgcatattcaattttgtgataaatagtggaaccagaattctagataaaaacaaggaagtgcccagcaggacacttattttctttaacatcagttttgttaaagtataatttacatgcaacataatcaccaatttaagtgtattattcaatgagttttggttaatacatacaatcatgtaaccaccactaaaatcagaaaaagaatattttcatcacccaaaaacttcccttgtgccctttgcagttaataatccccttctccagccccaagtaaccatcgatctgctttctatacattagtttgcctttcctagaatttcatataaatgaaatcatacagtatgtattcttttgtgtctggcttctttttctaaatgtagtgatttttattttttatatttttatttatattttttatttcaataggttattggggaacaggtggtgtttggttacatgaataagttctttagtggtgatttctgagattgtggtacacccatcacccgagcagtgtacactgtactgaatgtgtagtcttttatccctcaccacccccaaccctttccctggagtctccagagtccagtgtatcattcttacacctttatgtagcctcatagcttaactctcacgtataagtgagaatctatgatgcttggttttccattcttgagttgcttcacttagaataatactctccaattccatccatgttgctgtgaatgccattatttcatttctttttatggtattccatgatatatatatataccacattttctttatccactcattgattgatgggcatttgggctggctccatatttttgcaattgcaaattatgttgctataagcatgtgtgtgtatcttttttgcatgataaattcttttcctctgggtagatacttaagtagtgggattgctggatcaaatggtagatctatttttagttctttaaggaatctccacactgtctagtttacattcccaccaacagtgcaaatgttcccttttcaccacatccatgccaacatctattttattttattttattttttattacggccattcttgcaggagtgaggtggtatcgcattgtggtttcaatctgcatttccctgatcattagtgatgttgatcatttttccatatgcttgttggccatttgtatatcttcttttgagaattgtctattcatgtccttagcccaccttttcatgggattggttgtttttttcttgctgatttgtttgagttctttgtacattcggcatattagtccttcatcagatgtatagattgtgaagattttctcccactctgtgggttgtctgtgaactctgctgattatttcttttgccttgtagtatagtttgaagacgggtaatgtgatgcctccagatttgttctttttgtttagttttgctttgactatgcaggctcttttttggttccatatgaattttaggattgttttttctagttctgtgaagaatgatggtagtattttgatgggaattgcattaaatttgtagactgcttttggaagtatggtcattttcacaatattgattctatctatccatgagcatgcaatgtgtttccactgtttgtgttctctgtgatttctttcagcagtattttgtagttttccttgtagaggtctttcacgtctttggttaggtattaatatattcctaagtattttattttattttgcagctattgtgaaatgggttgagttcttgatttgattctcagcttggtcactgttggtatattgcagagctactgatgtagtgtacattaattttgtatcctgaaactttgatgaattcatttaccggttctaagagcttttcggattagttcttagggttctctaggtatacaaatcataccagcaaatagtgacagcttgatttcctctttaccaatttggatgcctttgatttctttctcttgtctaacttctctggctaggacttccagtactgtgttgaataaaagtggtgaaaatgggcatacttgccttgttccagttctcaagggaaatgctttcaacttttccccattcagtataatgttggctataggttggttgtagatgacttgtattaccttatgtcccttctatgccaattttgctgagggttttaattataaagggatgctggattttgtcaaatgctttttatgtgtctattgagatgatcatgtgatttttgtttctctgtttatgtggtttatcacatttattgacttatgtatgctaaaccatccctgtattcctggtaagaagcccacttgataatggtggattatctttttgatatgctgttggattcagttcgctagtatttcgttgaggtttttgcatctatgttcatcagggttattggtctgtagttttcttttcttcttttgtccttccctagttttggtatcagggtgatactggcttcatagaatgatttatggaggattccctctttctctatcttttggaatagtgtcaatacaattggtatcaattcttctttgagtgtctgatataattcaccatgaatacatttggtcctgaacttcttttgttggcagtttttaaattaccatctcaatctccctgcttgttattgatctgtttagagattctatatcttcctagtttaatcagggaggattgcatatttccaggaatttgaggaatttgtccatctcctctaggttttctttctttttctttttctttttttttttttttttttttttggagacggagtttagctcttgttgcccaggctagggtgtaatggcacagtcagctcactgcaacctccgcctcccaggttcaagcgattcttctgcctcagtctcccaagtagctgggattacaggcccccaccactacacctggccaatttttgtatttttagtagagacagggtttcaccatgttggccaggctggtctcgaactcctgacatcaggtgatccgtccatttcagcctcccaaatcttggcgtcggctgggattataggtgtaagccactctgtctggcctcctctaggtttttttttttttttttttttttgagatggagtctagctctgtcacccaggctggagtgcagtggtgcgatcttggctcacttcaagctccgcctcccgggttcacgccattcttctgcctcagcctcccgagtagctgggactacaggcacccgccaccatgcccggctaattttttttgtatttttagtagagacagggtttcaccatgttagccaggatggtctcaatctcctgacctcatgatccgcccaccttggcctcccaaagtgctgggattacaggcgtgagccaccgcgcccggctcctctaggttttctagtttatgtgcataaaggtgtttatagtagctttgaataatcttttgtatttctgtagtatcagttgtaatatcttccatttcatttctaattaagtttatttggatcttctctcttcttttcttggttaatctcgctaatgggctatcaattttatttatcatttcaaagaaccagttttttgtttatcttttgtatttttttgtttgtttgaatttcatttagttctgctctgatcttcattatttcttttcttctgctgagtttgggtttggattgttcttgtttgtccttagattatctaggagatcttataatctaagttgtgaccttagattatctatgtgtgctttttcagactttttgaggtaggcatttaatgctatcaactttccttttagcactgctttcactgtatcccagaggttttgataggttgtgtcactattatccttcagttcaaagaattttttcaaatttccatcttgatttcattgttgacccagtgatcattcaggagcaggttgtttaatttccatgtatttgcatggttttgagggttccttttggagttgacttccaattttattacactgtggtctgagagagcacttgatgtaacttcgattttcttaaatttactgagacttgttttgtggtctatcatatgatctatcttggagaatgttccatatgctgaagaatagaatgtatattctgtagttgttgggtagaatgttctgtaaatatcaatatctgttaagtccatttattgtagggtgtaatttaagtccattgtttctttgttggctttctgtcttgatgacctgtctagtgctgtcagtggaatattaaagacccccactattattgtattgccatctatctcatttcttaggtctagtagtaattgttttataaatttgggagttccagtgttaggtacatatgtatttagaactgtgatattttcctgttggactagtccttttatctacgtaacgtctctctttgtctttttaaactgccgttgctttagagtttgttttgtctgatataagaatagctactcctgcttgcttttcgtgtccatttgcatggaatatcttttcccatccctttaccttaagtttatgtgagaccttatgtgtcagatgagtgtcttgaagacagcagaaacttggttggtgaattcttacccattatgccattctgtatcttggaagtggagcatttaggccatttacattcaatgttagtattgagatgtgaggtactattctattcatcctgttatttgttgcctaaatacctttttcttcattgtgttattgtaatataggtcctgtgagatttatgctttaaggaggttctattttagtgtattttgaggatttgtttcaagatttagagctcctttaacagttcttgtagtgctgggttggtagtggtgaattctgtcagcatttgtttgtctgaaaaagactgtatctttccttcatttatgaagtttagttttgctggatacaaaattcttggctgataattgttttgtttaagctggctaaaaataggaccccaatcccttttagcttgtagggtttctgctgagaaatctgcttttaatctgacaggttttcctttataggttacctgatgcttttgtctcacagctcttaagatccttttcttcatcttgactttagataacccagtgactatgtacctagatgatgatctttttgcgataaatttcccaggtgttctttgagcttcttgtatttggatgtctagatctctagcaaggctggggaagttttcctcaattattccctaaaatatgttttccaaacctttagatttctcttcttcctcgggaacactaattattcttaggtttggatgtttaacatagtcccaaacttcttggaggctttattttttaaaattcttttctttgtttttgacagattgggttaatttgaaagcctggtctttgagttctgtagttttttcttctgattgttcaatcctattgctaagactttccagtgcattttgcatttctctaggtgtgtctttgatttccagaagttgtgattgttttttatttgtgctatttcactgaagaatttttctttcatttcctgtatcatgtttttgatttctttaagttggacttcacatttctctggtgtctccttgattagctcaataattgaccttctgaattttttggggggaattcagagatttcatcttggtttggatccattgctggtgagctggtataatcttttgggggtgtgaaagaaccttgttttgtcacattaccagaattgtttttctggttccttctcatttgggtagactatgtcagagggacgattagggattcaggggctgctgttcagactctttggccccatggggtgctcccttgatgtggtgctcttccccttcccctagggatggggcttcctgagagccaaactgtagtgattgcttttgcttttttgggtctagccacccagtggagctactgggctctaggctggtattgggaagcatctgcagagtcctgtaatctgtaatgtgatccatcttcaggtgttgcagccatggataccagcacctgctcctgtggagctagcaggggagtgaagtgggctctgtgagggtctttggttgtgtttttgtttagagtgctggttttgagttggttggcctccagccaggaggtggtgctttcaagagtgcatcagctgcggtcccacacggaggaagcaaacttgccctagagacaactggttaagtattcaggattctcaggcagtgggcagggctgcagagctcccaagagattacgacttttgtcttcagttaccagggcaggtagagaaagaccaccaggagggggcagggaaaggcatgtctgagtttagcttctccttgggcagggcttactgcagctgctgtggggaataggggactgtttcccagtccagtggagttatattcccagggggattatggctgcctctgctgagtcatacaggtcaccagggaaatgagggaaagctggcagtcatgggcctcacccactcctatgcagcctgcagtcctaaaggctggtctcactcctaccatgcccctccaacagcactgagtctatttccaggcagccggtgaccagggccgagaacttgccccagaccacgagcctccctgttgagaaagcaagcagactcacaggtttttggcatctcagggagcctgcagcagtgatccagttcctttaaagggtctgtggattctctcggctttcctagtatgtacctgtagtagttcttggagcaaaagttcacgatgtgagtctccactggctgctctgtccatccgagcgggagctgcaagctagtctggcctcctatctgccatttaatctcatcacatgtagtgatttttagattaatccatattactgtgtatatccagtaatatggatattccttttaatatgtgtattcctttttgggtagtattctgttgtatggttatgtcacaattttttaaccatttttaaccattcttctattgatagacatttgaattgtttccagtttgggctgttacgtataaatctgctatgaacattcatatacaagtctttgtgtggacatgttttcatttgtcctgggcaaacacctaagagtggggttgctttaactttatacgaaactcccaaactgttttcctaagcagctataccattttgcattcccatccacaatgtacgagttccagctggggagcagaggttatttttaaagcatgaacccaatgccgtcttgactggaggtgatggcagaaacactttagaataaaatgctagaaatggtaatgaaggctccaggagggcacagactccaagtgtcctgtttcctgctgcatccccaatgactagcacagggcttggctcctggcacccgctcaataaatgaatcagtgaataaaagatttgcctctgacagacattaacagcttataagtgttgggtcaaagtttggacctactgcatcttatttaatcaaaagaagttttaggagccctggtttctccttccccaagtttcattagacacttaattttcaactagttggcatttctacctggttactacaatatctgctgactctagtctggcttcccttcacagcccgagacggccactctgcctcccatcactgagtatgcacttcagccagcagaaaggaggacatgggaagagaacacaccctgtatttatggagacttggctgtagttgcagatcatttctgcttatctgtcatgggccagaacttggtcatatggccacatccagctgcagggagaactggaaaccatggcctttatttggatcagctgtatgcctaaataccaggaccctgttgctaagaaggggaggacagacaatgaatcacttctattgaatgaatgataataatggcaggccctaacctgagcctggctttgtccagaactgctgtagggacttcgaggtcaatatgccatattattcagaaaacatgtttatttttcaactccagggagaatcctttcaattcatacacaaaagaaagcaaggctggtgagtacggaaggtgtctcactcagcacttcttgtccctgcccctggccacacaggccagccacttggattcctcctcaaggtggtctgcttcagctacaaggggcagggagcatttgaaggatggtgcattcaaagaagggggagctaatgatgggatggggacatggacatataccactggcctctctgggaaccaaatggctccctctgagtgacctaccttaagaagctctggtgtgctaagcagaccccagctgggccaccatggtctacagatacactcagtaagggaagcaagtgagagagaggaggggatccaggcaagggtaactaggatgtggaagggacttgaaatgtatctgtgttttgtttccaggatatcttatcatgagttcttccagaagcaggtactgagacaaagaattgagggcaggtagttcatttggacctaatcccaggaagcaccagtagggacatggggaagtgagacagggaaagagtgcagggtcaaggaagttataccactgtgcccaagtggggctcagtcctactagggaactgtgggagccagtgtagaatacacaccttgaagttaccctgcccaaggggttgggtttaagagtttaagaaagaggaaagaaagatgaaatgcagctcaacattaaatcggccagaagcccctctcaggtttatttctctaagataaacctgtctttgactgttgagcctcatttcctgtttctttcctctttctttaactcttacactggggagctgtgatttttacacatcagttattggctgagggttgctcccaagacctgcttaattcaccaggacttctggcctgccaagcgtggagacagaaggccttccttacctgcagaaaatccttagtcaaagaaatcaaatgcagggcagctggaagttggctggagcacaccgaggtggtaagccctgacggatgtggagtgggcactgggtacttactgtctgctacaaaggatgaagccaacatcaattacacatgctctcgttctgtgacacacacacacgcctcttgcacacctcttacactggcttcatttttcctgactcacactgctccctctcaacacaacacctttgcatatgccattctggatgtctgagccactcttctactctttctgttcccccttccatgagttaagttctacttattcttcagatcttggctcaaatgccccttcctcttgccccctcccaccccagggcaagatcaggtcctcctgttgcacattgtcccagctccctggcctgtaagtgtgtcattataggtctttaagtttaggtgattaatgctgtctcctccatcagactgtgaggaagggatcctccctttcttgtttacagtgacacacagtagggactcaaaaaatgtatgttgaatgaatgaatgaatcaatgccagtctgatcgactaaggctccctatagctagagagggaatttaccagctaaagatcccaggaagagaaggcggctaattagcaattcattaggatccattttcacatctatagtcaatgctaatcacttgtttgtttaaaacaggaagttctgcactcattaaagccattactaaatgaaaatgtttctcatggaagtctggcctcccacactggagtgtaaactcaaggactgcaccccctcttttgtgtagactttccagaaatcagcaaagcaggtgctcacaagctggaaataccctgggttaggaccctagtgtttgctgccagtgggaccttaggaaccaggcccttcagctctggctgggagtggcctggcaagggtgagctctgcccatcattcctcatccaccctattccaccctgcagaaaagccccagagaacaacttccctatggcaatgctacccacccattactcacgcacctattgggtgcccgccagatgtacagcccaggcccacctctcgggtattgaacagactggcctgctttcctgaagtttcacctttttctttatcttcattgcccactgcccccaccttacatcaacacgagcaacaccttaaatgtgttgtttgagcctttgtacctgctgttccctctgtccagagcgggccttccctgtgtgtacttcatgggcaaatactgcaatgccagcttggtggtgtctcctccatgaagcctcccaattgccttttggttcaacctctgggctgccatttatatttttgaatatcatcatcttcatggtggtgaccaactctgatagagcacctcccaggggccagccggtccctgagtctatcactctaccactctggtgtcccatgctcccagggaggtactgttcttattttcatttcgtcaaggctaagagtcctgaagagactttcccaaggccacatggcaggccttcttatctccagagcccatgagcttaactgccgctccctacctcctcccaatgcagacttattgctgtcttctcacacgaacttgccctgtttagctctcctgtaagcctagctcctaagaggcagtatacatgtctttttgtctctggggctggcacatagaaagccttgaaaaatacttgttgaaatttccaaccagcagatttcagatcctgttccataaaccctgttgtaactgatcatgcaactgatcagtagcctcctgttagaatcctgtctttgctcttaatgtctctggaggagttactggatatgtcagtcatcatgaccatgagatgaagcggcaagtcatgaccctgtcgtgtgtctctgtcaggtgctgaagatgcagaaaggaatatgactcctacatgagaaaaaggctgcaagccccacgcagagctgtggcgaggagggcggcattgcagtgccctgatttcaacatgggtagtcaggaaaagctccgaggcctgacctgcctctcttggggttctgagggggctcagatgagctagggcatgggcgggagatcatcttcctacatgcccacggggatacaacccattccctgagaggcatcctctccaagattcctttgcttattttttgcttattattattattattattattattttttagacggagtctcactctgtcgcccaggctggagtgcagtggtatgatctgaagcaattctctgccttagcctcctgaatagctgggattacaggcgcccaccaccacgcccagctgattttttttttttgtatgtttagtagagacggggtttcaccatcttggccaggctggtcttgaactcctgaccttgtgatccacccacctcggcctcccaaagtgctgggattacaggcgtgagccactgtgcccagctacttatttggattaagcattgcttccccttctcccagccctggttcccctcgagaaacacaaagcacaagcgagggacccaagatgatgttaggcccctaataccaaatgtgagtttgccataggattatagacacataaacgccttctattttgatgactttttttgtgtgagtggataagctacacatgaatagggtttaaaaaaatgtcaagggtgtatggggtacttgtgagaagacttctcatcactgatcctgtcacccttcctagaagctgaaggctgccacttgggtgtcctttaagagagaatccacacatcaagtgtcccccttccccatacgcagcagcattgttctggttgtctttttctttttttcttttgagatggagtgttgctctgttgcctatgctggagtgcgatggcgctatcttggctcactgcaacctccgcctcctgggttctagcaattctcctgcctcagcctcccaagtagctgggattacaggcacctgccaccatgctcagataatttttgtatttttagtagagatggggttttgccatgttggtcaggctggtctcaaactcctgaccttgggtgatccacccacctcggcctcccaaagtgctgggattacaggtatgagccacagagcccggccgctgcttgtctttttctttaataatgtatcttggagctatacaaagaactacctcattattttgaaaggctatgtggtacactacccatgtttatgaggcacttatttagccagtactctcttgatggacttttaggttgtttccattctttcattaatgcaaacaatgcatcaacaaacactttattcatcatctttgatcatggcaagtaaattcctaaaagcaggattgctgagtcaaagggtatgtgcatttaaaattctgatagctattgctattttattttttattctttcaaaggcagactaccacaggtagtgcctcatttgaatgtgtctggagccttggaagcttggagccctacgttctcctacaaatggaccttgagagcttgtttggaggttctagcaggggggctcagctacttatatacccttgactgaagaccagtcttcctctattggggatggtcgtcctcttcgacagagtgtgcagcttcaggagggacacacatggagtggagagggaggaaggggacaactgcccagccagccagatcagccgaatgaaccctggcaatcaatggggtgatggatattgcagccagatcgcccttacatcctgttttattcttttaaaatgttgcacagtattttgttatataaatgtactggagatcatttaactagtccatccctccctccctcccctgttctttgtaattttcttttcttcctttcttttttttttttttttttttgagactgagtttcactcttgtttcccaggcgggagtgcaatggcgtgatcttggctcaccacaacctccacctcctgggttcaagtgattctcctgcctcaggctcccaagtagctgggattacagacatgtgccaccacgcccagctaattttgtatttttagtagagacagggtttctccatgctagtcaggctagtctagaactcccgacctcaggtgaaccgcctgcctcggcctcccaaagtgctgggattacagatgtgagccactgcacctggcctctaattttctacttactttaaggaatagttaacagtaatatttcatgactttggagtgcagtggcacaatcatagctcaccgcagcctcaatctgctgtgctccagtaatcctcctgcctcagcctcccaacatgtcgagattacaggcatgagccaccatgcctggcctcatgacatttgaggtatcactcttcagtatagctcagtagaatttctgtgttgtggggggcatttcagtctcttctggatgaagagctcagcaccatgattaggttatttcctatcttttgcttccattcgttggatattaaggaagagtatcaagcataaagcctggcacatactaggcattcaatatttgtgaaaatatttttaaaaattcggaacaatgttgcagtgaactgcctaggcgtgtacatctttgtgcccatgtgtgagtatgaaatacttaagaggcagaattactgatcaaaagtgtgtgcattcaaatttggtcgataactgcccaactgacctccaaagaccttgtgccaatgtacatgcctgtctccccatatactttccaacattatattatcaaattatagatgttgaggaggtggaacgatgcttggggattgattggttcaaaccctttacctagtagatggggaggctgaggcacaggcaggggaagagagcgcccaaggtcacctgtgagctgtggcacagttcgattccctccagggaactggggcagggtttggggtgaaacacttgagtgcacccggtggggtccatgagacaatgagaaggaaggctaacaagaggtggggtgcgctgaggcctatccctcccccacacctacgcccaggtaacgcaacatgttttatttcatgaaggaacttctgactcttctccactacttcttctccccgcctccccccacccatctttttccttggaaacagcctcagagattctgaaaggtgctttccttacttctgagtccgcctgtgtgggaggaagctgaggacgtgagggtactgattgagagagcaggttgagacccaggagctgctgtgcaaaaagaatggcaaattatataaggaggggaaacggaagcgggtggtggaggcagccattcatcagtgttttttaaccctttcctgctgcaaaaacaggcagccccagatgccgggatacggccgcagtgagagagacattttcataaacggttggtgctgaaagctttgaagcgaggagggcactgctccctccttgtcctttgcagactggctttgtactctgggtaaaactgtcagaaaaggtagaacagctcctaatctaggagatgattcctgtgggaaatcaggctgcttttcaagcgtaatttgaaaagccgctgcctccaaacttcagttgtggagtgggggagacgggggcggggggggggggagacgggggcgggggggcgggggggggcggcgcagagaggagcatgccatttataaagcaatcaacgcttccacagagtccaccatcactcagaattattttctgaaatttggcctctattccttactctggaggaaaggcagtacgggcacctggcttccaatcaagcccgacgcacaggactgggtaagccacacaaaaggagagggaccctgcattgctcatcacagctggagctgcggaaaatcatttctagggctcctcaactctccggaacaagccagaggaagcctcatcagaggttccattcatctgacttcttacttttaaactttaaatcacatatttatgtgcctcaagttgcccatgaaccacagcatgtcaaacagttcggggttgatggaagaggtacattttctcgtcctgggactttcagaaatacaatttcattgccagtctctctcccttccaatttctcccgtatgctgccacgagatgaatattcctaacatcctgctttcaatacattattcacctgttcaaggaccttccaaggccacttcttgatcccttaaggctgggatactcagattggcattcaaggccttccataaatgtggcctcagcgcccacaacctcctcacattcactctcccagactgccacaccacacgtgtcacaggccacaaatacagggtggtgagtgcctgtcatatatgccctccccgatcccagcatctctcttcctggtaaccaaacacagtgctttcttttagggaaaccactccacctcaactctttctccatatggtgtgggtgtctccagacttgtccccgagattgctgcagttcaggggttggcaaactaaggtccgagggcaaagcaaaaacaacaaaccaccaatgaacaaaaaaacaaaggcccctggcttattttttgtgaggcccttgagctaataacttttccgtttttttttttttttggccaggcgcagtggctcaagcctgtaatcccagcactttgggaggccgaggcaggcggatcacgaggtcaggagatcgagaccatcctggctaacacggtgaaaccccatctctattagaaatacaaaaaaattagccgggcatggtggcgggtgcctgttgtccctgctactcgggaggctgaggcaggagagtggtatgaacccgggaggtggagcttgcagtgagccgagactgcactactgcactccagcctgggcgacacagcgagactcccgtctcaaaaaaaaaaagaatttttccgttttttaaaagattgcggcccagcacggtggttcacacctgtaatctcagcactctgggaggctgaagtgggctgattgcttgagtccaggagtttgaaaccagcctggttcgcaatacagcaaaatcctatctttactaaaaatacaaaaaattagccaggcatgggggtgtgcgcctgtaaacccagattacttgggaggctgaggtgggagaatcatctgagccagagagattgaggctgcagggagctgagatcataccactgtactccagcctgtgctaccagagtaagaccctgtttcaacaacaacagcaacaacaacaacaacaacaacaacaacaacaagattgtaagaaaaaaaaagtcaaagaagatgccacagagacctttatgtatggcctgtaaaccctaatagattcactctggccctttacagagaaagttgctgacacccgttgtagatggaccaagtttggtttggggctgggcaaagcaccggctgagccaatgagagcaaatcctaggatttaggctgaggtgggaggatctcttgagctcgggagttccaggtcagcttgggcaacagtgcaagaccccatctctaaaaatccaacccaatcctaggcctttggctagagctgttaggaggtgcacattcacttgggtgtgtgatgctgaaggaacaggagcctggagtcagagtgaagccaccactggggaaagcagcatcagaagacagacaggctgggggagctgtgcctgcggggcctcttcgttctgtgtgccaaggtatttttttttttgctcaagccaattttgaattgggtctcctgtcactcccaaccgagttatgatgtgtacagatactggcaggtatgcccacagctctttgggcatgtgatttttcctgtctggaatgcccattattctgtctgctgaaatctacttgtccactaggacgtcacctcctcctagaagccttctttgattctctcaccctaccgtggttctattttagtttctgggtggtacatgctgagacctaaccatctacttcctcggctgtaaccgtcaagaggagtgtgtattgcagccataacaaagccatgggcagcgggggaaagatgttgctggagccccaggcacagtgtcagatgctttagaaacactaccgcatccatcccctctgatgcagctgcctgaagaggcagtggcaacagctctaattcagagatgggaaaatgcagctcggaagtaaaatgacttgcccaaggtcacacggttacagagaggcggagtcagaaatgaagcccagcgctgaggaactccaaatcatccatgctccttccacaacacagtgccttctgaagaccacagccacccccctccagccatctccaaggatcccctgggtccaggtctatactttcctgcatcctccaggagccttctacagcctgcagatcacggctcaaacatctcaagctgaaattcaaggccttgcagtatctacttattcattctataccaacccctaaccccagcccaaacaatacttgaagtgctggtgcgccctgagtgaaataagaaacccctattactccacaagttttaacagggggaatggagtattttgcaaagcttatgttaacaaggactagactgagtcagctggacaggttcaaaattaaagttgcctgaatataatcataactggagatgcactctaatgagattttttttttttttaaatcaagtgcaacaatctgcctgcaagaatctgaaagcaactcaagatagcttaactctttgaggaagaagtgggttttcggagagccatggtgtatcctcttatgctgattatctcctggagagctttcgcagagtccaagtttttatcaggatgcgtgtgcacatcttcctggcctctcaggacagcatcgcggcttgccacacccagatgctctgcgaaggcaggctactttaatctcaccgggagagctaagtaatgctcagcaagtcatgccacctccctgacctgttttctcatttgtcagaatctggagactgaattagcctatcactttgggtccccagtggaattaggaacaatgctgtgaatgcttttaccatctccgtaattagaggcatttccctccctttttccaaaggaaatcatcccagaattttaaagctcaaagagagttaagtgattatcttgctctttgagggggttcttaacttggggtccttgcggggtcacaggtgaagcctctggaattgtacatggaatcttgtgaggtcagtgaagcatcctcagcagatgagatagtgcccactgcagtcttggaggatgcagtgccctcctgggggtaacaagggaggagcgggagcaagtttctggggagtgggtccccacaatcccaacagatgaagagctccccctctggtccaatccctccactttacaggctgcagaactgaaaaaagccccaagagaaggattccctgagggctcaggagccagacagagccaggctgccgccaccgagactggagctggacataactcggcccttgcagggcggagtggagaaggaattgagtggggcctctccagagctggctggggaccctcacaccaatatgtccccatgccaggcaccctctgggctttttaagagtttggggattatctatgtcaccggaattgtgatctagccggtgcctcaccatgcacctgtgaggaagcattcatcatccctgggatccttcagcatacatgggagccctggggtgggatgtgcacctcaatttacataatctgtgtgttttaaatttctcagctagaaaaaaatcgagtatttatcttgccttttcttttctttttttttttctttttgagacgaagtattgctctgtcgtccaggctggagtgcaatggcgcgatctctgctcactgcaacctccgccttccctggttcatgccattctcctcctcagcctcccgagtagccgggattacaggcaggtgccatcttgccttttccatacaaactgtaccggtaggttaccagatggttgatgaagggaaggttccccttacacaaggactctggttaacagcaagccagcatggcagaattagaacagcattactctgcaatccctaatgagtgtgtggattccagtgagatcaccatggttgctaataacacagtaagatcagacttacatacctcctgatggaagtacgtaacaccacctatggaggagaagtgccaaaaacaaagctaagagactcaatcctgatcacgactcttactctgcctcccaatggccaggaaacacaggtgagaggaggggcccaagaaatgacctccatagggatgcaatcaataaatccagacggtgggaaatgctgtaggaaaaatgaccgtgtttctccaccaaaaaacttacaaggaaaatgagagagaggtggagggggaaatctacacattaaaagagatttattttttattttagagatggagtttcgctcttgttgtccaggttggagtgcaatggcgcaatcctggctcaccacaacctccatctcctgggttcaagtgattctcctgcctcagcctcctgagtagctgggattacaggcatacaccaccacgcccagctaattttgtatttttagtagagacggggtttttccatgttggtcaggctggtctcgaactcctgacctcaggtaatccgcccacctcggcctcccaaagtgctgggattacaggcatgagccactgcacccggcctaaaagagatttattagggaatatactgataccagcaatgtatatcacttatttggatcctgatccaaacacactggggaaatttagacactgaaaatatctgacaatattaaaggatcattgttaatttggttaggtgtgataatggtattgtggttgtacgtttaaaaaaagtttcaatgtaacatctgggatttgcttcaaaaaaatccggggtgtggagagagaggtacatgggtggggcacagaggaagcaagcctggccacatgctgactgccagggaagccaggttcatggggacatgggaatttacactattacccatagtaaaatgttaaaaaaaattaacctcctgcttgaaaagtaaccaaaacattgttacgagtggttgcctttggagagagaaacctgacggctgggaaatggggagggggagatttactcttcattgttttctgttttgtactgcttggatttggattttataccatggttctatattaaccattcaagaatataaactcattttaaaaaaaccacccagtttaaataaaaaacttcaaagtgagcttttgatcatacttttcatccaagaagtgtctttatttccgtttgtttcccaaagatcaggttaggtaaaacaaattagttccatctcattatttgaagacagggaggtgtatgcagatggaggggaactgacctcttgtgtgtgtgtgtgtgtggcctgtgagggagctggggctatagagatggtaggctaaggggttaaacccttagagccaccagacaatgtcacttgacaacacaaggtatgaaacataaataatagtcagctactttccttcaatccatttctaagcagttgtgtgatcgatcaatttataaatcgattggctaactaattcaccttctctgctgccgctgccaccgcctatggccggggtggggtcagcccagcttctggctggcagtaggggagggatcggtggcctctgtggtgggggagcagggtcactgcagctccttgagcagctggagcacgttggtcgtgtaggggttctgctgcccgctggccccgtgcagctgcacagggtggaggctggggtggggaggtgtgaactgcacggggcagtaaagctcgttcaggaggaaccaggtggagtctgggtccaccttcatcaagtggaggaagacgctgtggagagatggaaaggagtgagtagagggtacagagagggaaggcggggaatgctacagccccaaccaggaggctgtttaccaggctatttgagaagaaactgataacaatatcaagtcacttcaaatagtagaaaaaacccacttgagttcctaagacaggaccagtaggatggtcccaaagcccaaccgaaatacaggtaacagtttcatatccatcgacatacagaaaccagtaattagtctgagcagaacaatattgacagcaaacaagctcttggcaaagaaagaggttgagttccagagtagaaagcaggagttttcacaaagaagaaaaacgacagagtgtaccctttcttaaaggctttgctcagctcacaggcccagcccagggttgaggcaggcccagggcagggctccctgtcctgctcgggggccctgagcaagccttaatattatggtcctccagcacgctgctgaagtcggcagttggacccttcctggctgagagccatggatacttggtggtgtgaacagacactcatggctcccgtgtgaggagcccgtttccccacagggatcagatccacagaatatgccgcctttggcaggctgtcaaagggttcctttattctcctggggcaggactggctgagctctgctctgtaacctttggcagagatagagcactgatgtcctctgacgcatgacagggacagagctcaagggccctgggctactggacaccccacagccaccgagggtggtttttatcttcgtctgaactttggggtcacaactcttgcctcttagctgctcaaatactatttctgaaagatcagtcacgtgcccagggccactgtgttgggcagtctaagcgtaaacttcatacatggtggcaattcagtccgacttggcaatccctggaagaatggggccctcctgcagtgagcagggcctcccagccagtctgcccatctcagctcaccatcgcctgctcggaggctgggctccccatgccattttgcccacaccactgtgcccaagtaaggctgccccttacttttctctttcaggacacctttcctagcacatattgaccattgattgtctccctcacaacataagctccccaagggcagggaccagggaccacatctgttctgtaggttgctgtatctcgggcacctggaatggcatgtggtcagcatccagttaatattgactgaacaggttctcatttctcttttttcccctgcaatgtgtccatgtaacaatgagttctcattttaatgaggacgtggtgagttactacattgcacatgaatgactttagacgacaaccctctctagaatatttaagttctacgaaaggatctgaaggaggggttaaactctcaccaccaaggaaggaacaaggaagattattaacaggattcaaattatcagaggcatcactagctatgtggctttgggaaattattcagcttgccctgtttcagtttccccattccaaaaatgggggatgtacttcactcagggttttgctgaggtttaaagcacagatcaagccctacacagtctagcacgtgatccctatttaccaattaacagtacatagtatctatttgataaatcacattttattattggcaattattctaaggagcctcttgcatactgctgggcattaaataggaacttcaacgcctgctaagtcggagtaaattctggattttaatttcactaatatgaaagacctgcaccctcaggggatttgggtcttaccgtgaagccagtcttgatatcatccttaggtgtagtggacatacactaaggaggtcagggaggcagtgggggagtggggagggtggacaagggcactgaattttttttttttttttgagacagagtctcactctgttgcccaggctggagtgcaatggcgcgatctcagctcactgcaaccttcaccttctgggttcaagcgatcctcctgcctcagcctcctgagtagctgggattacaggcatccatcaccatgcccggctaatttttgtatttttagtagagacggggtttcaccatgttggccaggctggtcttgaactcctgacctcaggtgatcaaccctcctcagcctcccaaagtgtaggattacatgtgtgagcaccgggcccggcctactgaattttttcctggcctgttctgtgcccaaacaatttacttttctttgctaggataatcttgtgtttataacctccatagtggttgttggagaagtgattagaatattctaattcatcgtttccacttcaccgcagaaagatgaggcctgcgtgggagacaatttttgtttaaaaataaaaatatctttgataattagagtggcaagggaaattatgaaaaaacgcaccaaaagcggggagcagatttctatttacacgtgacacagttgacagttttccctggtgccaaagactgttagaatgcaaatggtttcatttgattttttcccctttcaagagctggaacaatttctcaagctacagcgtggtgctctcccagcttcaaggaatatttttatctgggcaacacccagcaaagcggtgccacgacccagttcagtcatagctgcgctctgacttacacagcatgaaaatgctgcaatgttcattttctgagctctttttaacatgctaaatatgaatgtcgtatttgttggcaggaaaggaaaagaaaataagccactctttttgccctgcaagatatccacataaaatattaacagaaaagcaaaggaaaaacttgtgcaaagttcaccttcttttattaagcaagagccaaactcttggaaggactgttttgggtctcatttctttgcttttaaaggggcagatgccccagaatggcaggaatgcacgttccttctcccacctctgtggcttagagcaagtgattttgcctcatgaacctgtttcctctttctccaaagatgatcacacctggcccactctcctcacaggtccttctgaggctctgaggagaggaggtgcaggacaacactttgaagtatatgatgaaaacagtattccttcttttcttccagaaagagagagagagggacacagagtctgaggcataattaacaccaccaatcttagcagcactaccatgccatggataattttcagataccctgaaaagggcaaaacatttgtcttttgtttcactcataattttctccatactgacttggtgggggtatcccagttctcagccaatgatgttctaatttcgcccattattttcaggaagaaacaaatgcaatatactttgtcctctgcatgcctgaggtggggagcaaatgccatgccatgcaaccagatggctggcaagtgtagctgtgctctcactccgagaggcaggcggcctgctgaactctaaacacgacaaattccaaaccgcacccttgttggctttaagcccctgggagctgagcctgaggcccaggaggtctgatctgagtccttagcgccaggctttgttccaaactctggtgtcactttgtcctggggccagttcctgcccagccttagctgaaaccagagagtgaacagctgaaagccaaagttgttgaaaactccttttgcataagccaaagccagaagacaaagacaggacctctgctttgaagtgactggggtaactgcctggaaaatgttcccaatacattttgcgatgcgcagggatggctgttgaacataccaaatggccagttccatcttttttcaaacccaaagagaaacactttttaaaaaatatatgtacaccatttaactcctgaacaaaaatttctttctcctccccccaggcccaaatcagtggctccagagagcacagttatcaagagattatctggtccccagagtatcgggaggcactcagctgtgccacatgcctccgagtgtcctgaggcgagtgattatctctcaataacctgtaaggccgtgtagcttaaatgataacttgactttaaaaaatttagaactcgctgttaggcagtttctaagcaactgtttccatggcaaagaagcctggtgtttatactgatttttcacttaaaatgcagttttattgaatttcactccatgcaggcagccatttgcctgcacttcagccctatctacaactgacggctatcagtaagtacctaataaactccagatgccaaaccagaagtggctccttccttcgtgatcagtatgggggtgcccctagtgagcaagctgggggcgaggaggtgggaatggggagggaggaaacgtgctcctggaatctggtcagctgggtttaagttttatctcttcatggtttatcaaacgtttactaaagcctggtccagcccaggccctaactgaggtgcttgaggcacaaagagagagggacaaaaaagcctctgccctcagggctccctgtctgctggggtagactaagggatcacagaggcccatggcacactgttgcaagggccagcctagaagtgatgtgcgggtggcaccaggcatggcttcctgaggagaggcacggcaagttgcttctctgtaaagagcgagtggaccagatcagttctaagatccctggtagctccaacagaccacgagagttttcaatcatgggcactggatcattactcaccccaccccacaatatggcaaaaccaaaaagaaccccctctgctctgctgcaggagcgaatattacagaatatgttctcaccatctctgtctagacaacatctgctcaaagagagatctagaaaaccgccagccaatgagggcccagtgaagctaaataaactgtaactgaaatgcagggcttccagctctcctgggtgacaggctattcttcctgtgtcaattacttgcttgagggatctgctgttctccgtctctttctggatttataaaatgctctcatgagccatcagggtaaatgccagtggtaaagaacatgtggctttgtgatctgtttgtttgcttacttatttggggcttctaaagaagttactcagaaatgtctccttaggaacacgatacaggctctctctatgtgggcatggttaaatgcagtgggaaagtaagctcacttgtgggaaagcaggcatactcactaagttattttggtgttcccgttgttccctctctggcagcacagcctccacactctcctcctctctggccatctcttctcccatcactctgtgcatgctgatgctgcaaaggaggctgtgtgtttccttttaaacaaatggatgctcagggtgttgatgcgtcctagccagcaagcagtggggctatgtttctatacttggtaatttactctaatgggtctcagttcattggttaaccagtatttcaagcctgtcctttcttgctattcaatttagctatcttcccctgcacggaggtcgttttttatttctaaatgttggaaatggaggattatgacttgaagcaacgatttactctccaaataaatactaccaattacctttgcagctatacatgctcgtttgacttaactatgtttacctgttcaaaaccattcatctatcgatctaacgccaacatgcatactcacacagagacccatatcaaaaatatttaaatgcaacatgggcaggacttaaaaccgtaaacaccagtagaagcaaatgatgctaaccatacctctgaagtgccacaagataaagtatcataaatgcagaggaatgattccattgctttgtgcatatttaaaaggatatggcgctgagaggtccaatctgttatagacaattcaaaaataagccagaatctaggagggtttacatcccactggggcgagatttaaaagcagccctttccatctggccagttctcctgcctccaggaaccctgcaagcctagatcccacgacagtgtattgggcacagatttcaaagtggcattctgtgctgagcactatgagggctgactcggacctttcccccagctggctgcactctcgggccacattgtttcctgcccctccctggaaggtatgtacccttgaagataaagacatcttcatagcagcctaggtaggcttgcccacctcctgcctgaactgttttcctgtaacctgtgctctggcactaagccagcagcctccactcacggatgccttcagaaacagctctaggaaatgtccttctgtatttactgcaaggacgttgaggatattagtcacaacagtacccagtgttcttttaagatgacccacagagaaattttcctcaagcgtcagtaataaggaaagccatgcttctttctgaaaagctttctttccttttctttttaaaaactcttattcaggtacttcctgtaccattttcctctttgctgtctgtcaggaagcacagagccactctgaaagctcctctctagcaagggtgcagggctctaactgtattgtctatattaacctcaactcggtctcatcttgtttttgctgttatttttccatttaaaaaatttcttcacttccttccttttttctttgttgcaaacaatttataagatgttccaagtcattttcggaataagaagaaatttaaataatgattcacaactactatttagtgacttttactctgtggtggtattttgtgctacctgactttactgaatccttgtcgtcattgtagtaggtgaaataagcaaaataacatacatgcttttttcggtcttatagatgagaaaacagagactttgagaagtgaattaatttgccaaggttatcttgttattgaacaacaatgtgaggccttggtagttatctctgaaaatcttcaactctcaacacagcacttggctcatcataagagacccaataaaaatcttttaaaatacatctatacaataagacaaatagagatcatctccctggctactttatttactcagtactgagacaacatttacttccacgcctctgaggtgttcgagagggatgacagagcctgcagaatgaggaaatgactaccctgtggtcgaccacagcctctgatgaccaaaacccactttgtgcaggcggtgctgcgaccaggctcgatctgtcatcgagaacattctgctcccaacctggcacggcatgcactgtgcacacacaccccacgcttggctttcctaccgggtggtaagatggttgaccctggcaggttatcagtgacatgacaacaccaaggaagaagggacagaattggcagcactgaatttaagtagatttaagtagcccagaggtccctgccttcagttctgaaacccagcaacccactttgtttgtaatctgcctgccagatgtctcttatctttgacaccatgaaatcaggcctatatatgcacagtgaacagctccagatctgagtgtatttttagaacaatgggactcaaaaagaaaaccagcaatgcctgtcaaaagatggataataggaaagctaactacttgggtttggatttgtcaactattaatcaagtgtcaaaaggaaaaaatattaggtgtgtcctcatttccatgctgggtgcaatccaagggggaacagctttgcagtccaagctcagccaaactgcccacaccatttaaggggatgagctactaatttcaagctcagctgaactaatggatcacctctgtggctcctcatccgttcaaatataataggctcatgtgtgggtaaagagaggagttggggctctgacagggatgaaatgaatgagcctgtgccggtctgtgttcgtccagggtttgaaggcaccagctggttctttgatgggatgggatcctactgctagaaagagagcagggaagtcagtctgtaaatgaaccttcaaacccggtcctgacttctgcaaacagtggtggcacaattaacatgaaaaagatccttttgaggtgaaatccccagttcagattttagtaaggatgaagcaggcttacaactagaaattctgtggccagtgtctatgtgtatgagtaacatacacatcatgtataacatatttgggaaatttacatacatgtaccccacataggtgtgtacacagatgtaaatataccttcagaacataagcagagggtagaggcccctatcttgttccctctaattccagtccctagaacagtacctggagactccttggacatactaacgtgattcatccacaagcaccctatgagaatggagttttcatcacccccagtttacagaggaagaaaatgaaatgaagctaaatcatttgctcaaggtcacatggccagtaagatctgaacctcggtttgtccaaagcaagactgctactttttctctcacacacaatggcgaggcagagggagctggaatggcaacctccccagcgccccatcaggggctacagcaataacagcatccaggacttgcgtggccagaaggtacaccagctggtcaccacctgctggcaccctgcatccctatctgggctctggggttagcaggtgggagtaggactgggggtggaggccaagcatcctaaaagctttatttttctattatgagacttgttgggcactgacttcatcttcttcttttttttttgaaacagggtctcactctgttgcccaggctggagtgcagtggtgtgatcacggctcactatggccttaaccttccaaggctcaggtgatcctcctgcctcagcttcccaagtagctgggacaacaggtgcacaccaccacgcctggctaatttttatatgttcagtagagacagggtttcgctatgttgcccaggctggcctggagctcctgagcccaggtgattctcccacctcagcttcccaaagtgctgggattacaagcgtgagccacagcacacggcctgacttcatcttttcaaaaatttgaaaagtattgtctagttttgtttccttttagcccagggtaaaaggctcattggatgatataaaacctcactgcaaaagccagggagtctcagagtctgctaagagattggcccaaggagtatggttttaatggagttcaactaggctaagtacatgtatggacttgaaggacaaacagaaatttggggtgtatgctctcttttcaaattcctttcacgtacaggaggcaaaagctacctggacagaaaggcacagaactgtgaaggcccagggcatgccgggagacatcctggagactgagaatttcaatcagcaaagtttgccactgcagttggctgagatgggggtgtggctgatctgacctgttgtctgtaatccaacgcctaccctcagggacactgtcttatttttagctcctggtatgctaagccctcctcccacaccacaaatatgatttgcacatttgttatccattgaagttacttaactagagggactttgggggagctggctttttttttttttttttgcattgccagttaacagtgacacctggtggtaacacacagcaaggtcacatcctgcccccaccatcccctgcccctcccccatgcctcccccagttggaagatttatgccccctccatacaaggcacatttgctagataaaagcattaaactggaatggcatctccgttcttagcatttacaacctcggttacatcaaccaccccctgatcaatgtccatttctagagtttactgcctggatgtaaaagcctgccacaaaggctatatttaatatggcaaattaaaaaagcaaacactggtttggtcattctttggagccaggaaaagcaaatgggagcaaggaaaaacccaagcatgatgcacataaagatgaactctcatggggctgctaagtctgcctccaccccaactcgatgaaggcgccccttggaggtcctaagcccacctgccagaggggcccacagacatggctgttctacagggctggtgcacatccctctccttccagaagacaggaggcctgggagcagcctcctgccctgagagcttccctcaccagccctctggcagacaggagagccacttccaaagcaagctggtcatctgcctagggtcggaaactcactacctctggcttttctgaatactaagccaaggttcccacttgggcccttgcaacgaacacagctttctcttctcccatgagggtaagtgtgtgtaagtgtgtcactctgactgcagtatggagaatacctagaggggcaggactggaagtgggaccagtggtgaggtctgttgttctggtgggagatgatggtggcctggcctggcctagtggtttggaggtgtcgttttgagagcaattttccaagtgaggtaggcgggctttacttttggtcatggatgtagggtgtgaaggaaagagaagaattaagaacaaacaacaggatggatggcagggccatgtgctgagatgggactccatctcatgcaggggacttggttcctcagtactagtaggtatgacagactgcactctgtcacctaggctggagtacagtggtgcggtcttggctcactgcaacatccgcctcccaggttcaagtgatgctcctgcctcagcttcccaattagctggaattacaggttcctgccaccatgcccagctaactttttgtatttttagtagagacagggtttcatcatgttggccaggctggtcttgaactcctgacctcgtgatctgcctgcctcagactcccaaagcgctgggataacaggcgtaagccacccaccgcacccagctgccaggtatgacttttccatactaagtggcccacccacccacccctctctccatgcggtaatgaggctcacagagagaccaggtttcctattgtctcaggcttcttctcccacttagagagcttattaatttcagcatcaagatgccaaatcagctcttgatcaaggatcaagactgattttttttcccaacttcaagataagtttgcaagtgacatgtgtgaagcaatccacctagctcttcctccccctccctgcccatcaggagggaggccatctgactcaacacttgaacggaatgtgctggagcaaacaaagggagctgcggtcaagtggtggggctgcgtgttcctccacctgaggctccctgaacaccagctcaagattcagcaaggtccaattccgggtttaattgctttcagcagcaaaaaagagaactagaaatgaaaagataatgaattgagaatattagcttatttgatggttctaaacttgaaggatgggatggagtgggtgtaggaaaaatagaatggatggggaatgtgaaaatcagacctttaactcttggttgtaataggcatctaaaaggatttacttcaagataaactcattatgttcttgagttgcactttaagtcacagcacaatcagctccaggggcaccgcccagggaggactattttcaccctaaattgattctgtacggaataaaaatgcctggggacagaagctgcttaggatgcgcccctgtgctcatgaaactatgactgattctgggactaagggatgtgacgggaaagggacaggaagaaaaaaggaaatgggaaatcaagagcaaaaaacagcaaaggacaataaatcaattcaagaagatattaccatcactcccagggagtgcaaggtttctaaggagcaagctggctctcctcactgcacagtcagagcagcctttccactcctcagggaatgagttgactcctaactcccaccccactgaagaggatcagagatgtgcctctagaagctaggaagatgcagggattccgctgcaggcgtgaagctggtgaggctgaaggagctgcagggctcagagcggcacagagtgccaggcccagctttcgccccagcagcagacctaccctgggatggcagttccaggatgcaggctgctcccacctggaaggaaagcttggagaagaggggcagagtagatttggggtctcatgtctggggaatgctgttgtgctgagttttagctcttagtcctaaagtaaccagcaacagcttcttctcctagaggtgatacagcttttctcaaataagcatggtcaaactcttagaaattggaatcatctagtttcagaatcagaaaaggccctttaagccattagtctggcaactcttaaggttcttcgggtcacagattcctattagaacctatgaatggttcctattagaaaaaggcacatgtgcacctgcctgcacacaaacaattttgctttgcacttgtgagggttcatggcaccgatgcccatctaagacctgccgtggagtcgacatatgccatatcaggaacccagcactttcactttgctgttgaagaagccaaggcatgaagaagtgccaggcacctggtctccaggcctagaagcagattcccctccaaccaggagggtgctgagtcctctctagcacaccgtctttctgcttcttgaccctctggaattgttgctgactttgcagcagaggaaaaggttactggcaaagagaaacacatctagtaaaaataccatctctagtgctggcacagttaaagaattatcttaacctggcagggtgacagagaaaagagcagagatgcctcaactctgcttgccattagcaaatcatctgtaatttagaacaaacgtaaagggatgcgggtgatcaggcagacgtacctcctggcagcctcttgtaatttcacgggctgtttgacactgaggtaaatcaagcaggcatcagccactttattcaggtcaccctcacctgcagaaaagaaaaacaaaacaagcatcagcccttacacttcatttgggacaagcagtgaccaactgtgtctggagaaactgcaacagctaggcaagatgctctgggctctctactccatcccgccaaagaacacatcaagataaatggacaaatgaggccaaaataagacggaaggaggtacacagaggggaggggaggggggcacgactgagcagagggcatgatggcaggggtgagacagatgctaagtgtgtgtgttcaggtggaactgcctggtacccacctaggtccagtctctcacagagggggcccaggccctgtaagacagccagctgcaacttgaaggccagcgtgtgcgagtaaactggtccagccctggcactgatgggggcctgggtgactagggagccagccagctttggcaggacatctttgcagaaccggctgcgaagaaagtcaccacacttgcttcccagggtacgtaaaacctgcagaaacagcctccaacctggtgagtgaacattgccaaggcagcaagagagctaaagaatgcttggtaattcgatttcatctaggtctctgcttgggggaaaaaaaaaatagaattactgctgttaattccttgcccatggtttgtgattctgacagttatgaatttggaggtctctgctcccaaggcatggctgcttctacccataaatacagattacatggggaataattcaaaggaatcttgggttggatgaataatatgattaatatcttgatttccctcccatttttgttaaaaaaaaaaaaaagagaagagcttaaagcagttcacatagatcatttcttgaatcttcctaacatcccttgagaaaatatgtatgctttaaactctagctagctgagcaaacacaaatactatggtccagctgctgccacatgcaggcatcaggaggttagtgactgggccgaggtccctgggctgaaccaaggcagggtccctgaagttgcagccgactcggtgttccttctgttcagctgcacaatctcttatgcacatcaccctcattctatctttcagaacagatagtttctttgcatgtcttgttttaaactttctctagcagaacatattgaaatgttttgccctgctgcacaagactgagtatacaggataataggaatttctttaaaaattggtaagcaaggcataaccagcacagtgtttgctcattttgcagagaacaaggctctcattttaggtccctcagctgaatggcacagcttctatagacctcagtgtcatcatcgtgtctgcgcatggggaaagcagcctcagttattgtgtacacatctttattttttttcatttttctatgcttgctgttatttcagacaacctattaattctcaccaaaccccgccctgcagtacatctggataagatttagcaataccacctccctctcccttaatctctttcttttttcgagatggagtctcactctgtcgcacaggctggatggagtgcagtggcacgatcttggctcactgcaacctctgaagcccgagttcaagcaattctcctgcctcagcctcctgagtagctgggattataggcgcctgccactgcgcccaggtaatttttgtatttttagtggagacagggtttcaccatcttggccaggctggttttgaactcctgaccttgtgatccacctgcctccgcctcccaaagtgctgggattacaggcatgagccaccgcgactggcctaatctccctctttctttggcacacatacatacacacacacacgtatcattttgtgcattttgttttgggaaaaaaacattaacaatttttaatattttaatttggtctagtatatgctgaagaatttacagaagatcaaactactttggccaacggtatctggtgcattaccagcttcattttgtgtccctacagatcttttctctctgcctcatcttgcgcaccttcttctaatttatggcagctcgctgtggtatgtatctctgcaggttgccttaagggctttttagaacaagaaaggatataaataagctaaaatatccgtgctaatgtaagccaaactaagccagggagaataataccttacatatatataggactgttagcttttcaaagcatttcaccaaacagtcccattttatccctgacaacactatgagaaaggtgggctaggtgttcctaagcccaacacgaaaatgggtggtcctgggttttgtcagcatcactcagctgggcagaggatgcccactgctagaacctcagccccttcgccttgactcctgtgcagtgcaaatatggtgtgaactcaatgctctgggtttgtatcacttactagctgttcgattgtgagaaaattccttaacttctctgagcttctttcttcctctgccaaaagtaaagacaatatacctaccttgcaaagtggttgtaaggagacaaactcctttgtggaggagtgctgagcttactgcctggccttttcatctactagttcatctgcttcaagttcaaaaggagactgttactttcttctttgtgcttttcttatgtttctatactttcttcacagtatgtgacattgcaatcgggtgaagagaaccaatccaaaaggccccggtgagctctgtgcctactaactctaccctcacaacagaccatgggggatgctggtgcagtaccttgaaggctctaagcactgccaggggggcgtcccgtgtgagtcggtgaacgagcgagggccaggcctgatgagccaagggaagcagctggtttttgtgggactgaagaacaaccacacacagatccagcacatccaagacctgaaagagacacgatttcagcagatggtataggcttgaaaacagatacctgggatcaagtcaccattttcaaagaataacatttagaaacgtattaattggataattgttttctgagtgctgactacatgccaagcactagctaggtactgaggggacacacagagacaaaatacacgtttccttgcctttgcagggttcatggtcagctggggaaagaccttaattagataacgcctaaatgaagagatgattagcaattgggacaagaagggaagtcaaaggtgaaatgcaaagaaacgaggggaaggatctaaaccacagactgttgggaaggcttcgctggggaaggagcttctaaaagaagacacaaaggatgagtaggagttagttctgtgaagattcatgcaactggaaaccgtgatgaggaagactcagaggtggaacagagctttcataagaagtgaaagaagggcagcgtggagcattacagagaagaggtaaaacggggcccaactacaaaggggtttgttaggaattttttttattttgtactaagtgcagtggggagccgtcaaagtgttttaagcaggaaagtgacatgatacaattcatgttttagaaaggtcattctggctgctgagtggagaagagacttgaagggtgacagagaaacaaagaggccctttaggatccacatgagaggagcaaagtgatgtggccgcgtgatggcggcagaggagagaagtgaaaggactggatatctgttttggagatgacgtggcttaaattgctgaaggactggatactggggaggggaagtgagggtttgaaaagagctgcttcgtttcaggggtagcaactgaagagatgcagatgccactgaatgagatggggagcacgcgggaggagaaagttgggcggctaggggagaccaagttctgttaccactacatggagaggcccagcaggcagctgaggtacaggttaatctcaccagaaagggttaggctaccctacatataaactgatattttaccttccttgtttcctgatctcttatatctcaaactcactgaaaagagactgcctgcatcagtgtcacaggcagcggtcagtacgacggccagcgcaggcttccctcccgcgtgggcggccagcgcaggcttccctcccacatggacgcccaaccttcacagggcgaggcactcgttagtctgcaagacagagagaagccggccaacacaaagcagtaaaccctactgggcgcctactatgtgctggtccacactgagactggaacagaagagaccctgccattgaggggtgaataattaggccagggagtaagagaaagctcagctgcacagtggggagcaggggatcaggggagcagagtggaaatggctttggtatcactgacaggcttggaatttgagctctgtcattaatgggacaagttacattatatttcattgactcaaagatgtacatttcccctctgcctggaatgttctccttgcccctttgcagggctgcctccttctcagccttgagaaatgttaccacctcagagaggccttccccgatgacctaggctaaatcagaaggtaagctctgtcttagtcagcagggttttgcaccgagtaggtacccaacacgtatctgccgcatgggtgaattactattttctatcaaatagaacgtgctattaccttgacagcctttctccaatatgtatgagtctgtgtattgcctctctccccacaaaagacagggagttccatgaagacagggattgtgtctgcatcatcccctctacacatcctctgcctgacctgcactagtcctcaataagcatttagcacatgaatgagtgtatgtgtcttatttcatgctgttttatatttataatcaacaaccctgtgaggtaggtaccatcatcttcattttactgatgaagatgctaaggctcaacatgatgaattaacttactcaaggtcacatggctaataagaggcagaaacaggatttggactgactcagatatgtaggtctgactccaacactgatgttcttaataattatggtatgtatacagctgctacaaatcctctacaaaaaggaaggtcttgaaggatatacagcagtatgttgaatgtatcagccaggcacctacattaaagccgtgcaggtaaaaaggtaagtgcttgctgaatggaacaacagatgaatgctaagagctgtcttgggaagactaaacaaactccacacaacacaggcgctgagatttgagataatctgtggatcagggtttcctagcccatcacccctgagcaaggcaatgtacactcattactaacagtgagtcactaaggcagttgtgtttctctctctttttttttttgagataaagtttcactcttgttactcaggctggagtgcaatggcacgatcttggctcaccacaacctctgcctcctgggttcaagcgattctcctgcctcggcctcccaagtagccgggataacaggcatgcaccaccatgcccggttaattttgtgtttttagtagagatggggtttctccatgttggtaaggctggtctcaaactcccaactcaggtgatccgcccacctcagcttcccaaagtgctgggattacaggcgtgagccaccgcgcctggccgacagttgtatttctcactcctgcttgggggtagagaggaatgctgtctccctttgggtgtaaggtcttctccagggtgattctaaaagccctgccccccacttctaccccaccccactgcatcctgttattgcagtcactactacatgctttcagcccttgctgatgggggtgctgcttggcaaactgccagcaagccagtctatattaggaagtgttcaagttttccctagaatgaaaacagagagataagggctagtgtcaggcttggaagaatgatctcattaaagtattaaaacctgcatcctacatagctgagaaaataatatcctttccaaagcacatggctttcttttccttggaaattcagtgaatccccaaaacttgtggtttttaatgcaggagactcagctccctttggcatctcagcagacacagaaagatgtaaaactgtcaccccacagacaaattccttttgatgccttctcttggccaccacacgtggaccaggagataaggggagctacgtgctcatccgtgtagccactgccaaccaggccacaccttagtcctgctactctgggaatgcagagaagcagctgcgcactgaccttcaggcggatttgcagatttttatctgacaacaagtggatgcagcgttccatcacgtccatggctatttggatctgcaatggcagtggtggctccacatctggacgggtgtcattctcatccactttgggagggactgactgttcctctggaaaaagagcacaactgggggcagtgttgtatgagtgataaaacagagatacctaaatttctgttctttataaattactcagtcttaggtatttggttacagcagcacaaatggactgagacacctccactcaagggggaataggtacagaaaccatgatatagccatataatggcattttatgaggtccctattttttttaggcacagggccttgctctgtccaagctggagtacagtggtgtgaacacggctcactgcaatctcaaacttatggggtcgagtgatcttcccacctcagcctcctgagtggctaggactacaggtgcatgtcaccatgcccaactaatttttaaatttttttgtagaaatgggggtctcactatgttgcccaggctggtctccaattcctgggctcaagcaatccccctgccgtggcctctcatagtgctgggattacaggtatgagccactacaccaggctaagcatgggttttaatgacaagagaaatgcttataaaataatattgtcttaaaaagacaaaaagcacaacacaaaattgcatatgcagcatgaacactactacatacgtttttgcatgagaggaagtacagcaaaatattaaaagtgacagggtaatgagataacagatgacttcagtttttttccctatgcctttggtcttttctaaatttccattaatgaatatttaagataaaaacaagatatttgggaggttgaggcaggtggatcacctgaggtcagcagtttgagaccagcctgaccaacatggcaaaaccccatctctactaaattacaaaaattagccgggcatagtggcgggcgcctgtaatcttaactacttgggagggtgaggcgggagaatcgcttgaacccaggaggcagaggttgcaatgagccgagatcgtgccattgcactccagcctgggcaacaacagcaaaactctgtctcaaaaaaaaaaaaaaaagggagagatagcagggttctcgtgtggaggagccttgaagctgggaagttccatggctggcctctgctctgtccttcacttttttgtctcctcttgattcatcctttgattaaaaggggggtgcacatctgtcttctccaccagcctgtaagaacttctgatggccagaatcaaaccttacttatctttgtaggtgaggtaacaagggcagcttggtgtagttcatagggcatggagtttggttagaggaggttggaccaagtcttgcctctaaaacctattagcaacttctttcatcctacattacctcatctggaaaaaaagggatagagcatgtatacctcacatgctactgagagcattaaatgagatattaccagtcattatcattctcactgtctagagtgctgcgttgcatgagatagatgtaagtttgtaaacggaaacatcaccacaagatttgagaattgcatgaaacccaggtcaaaatccttaccctgaaaaattttcctgatctacttacagcccccagcctcatgccaaccctgattaccagctgtgctcatttccactgagcagagcactgctcccttaactttttcccatttcagttccctctgctggaaagacagactcttacagtagaggctgcacctgtctctaacagatgctgaaaagataaattaaaatgcatttgtagaatgcttggatttcttggagaaagggacctcagatatacaaggtgcttttatgtgcttaaaacaaaaaactcatgtcaagccagcactgaggcaaacattccttagaatgccaagtgtgtggtgtgtacttgatgaatgataagcatgataggcctgtgcttttttccccagaggggaatttgttgtttgaaattcacctattgcagaatcttatttgagggatgtggattttcctgttattggaagaagggtttgactctttcagtctgctctacgtgaacatcaactaacaccagaagatcctaatcatgaaggaatggattcactgacagtgctcaaattttaaacaagaatggcaaatctggattatgagggatcagaatgcctcccctgcttcagcatttccaggtttgggtgaagggtgcagttcacaaaaaggactggattggctcgagaaacaaatctgagaagaaaaagcctgatagatttctgatcagaaaactctgtcctcggggagagcaatgactcaattctgcataaatcattatttgggccctgtgatgccttttctgctatttagaaggaatttgttgtagtgagtggcatcaagctactatttcctgttacactgctggaagtactggcttcagttcaccagaatctcacagtggagatcaccaaaaggaggaaaaaaacaaaaaaaggaaaagaaaagaaaaagaaaaagaaacgttttattccaacctcacaaactaatttgggactcggttcgatttaggatggttctgagaccaccaagctcattatgacttggcattttatatttgcagaggagatcctaataatttattaatccttccgtgacctgaagctccagattgagcttgtgaataaaacaacaggccagagcttcaactagcctgaactcccttcttctttatcatataaattggtaagaaaaagactgcaatctcctcccaccaacaaacaaatggacaaagcatataaatagacaatgggaataaggaaaaaaaacctgttaggaaagaagcttataaagacattcaacctcactggtaatcaaagaaatgcaaggtagataacaagacccatttttcacctattaatttaggaagaaaactggaaatagccaatgttggtaaggctgtggtgaaaccagtattcatcctgcactgccgaaggaaaagtataaattgacacaacctttttgaaaggcaatttggcaagcattaaattatgttcatatccttgacccagaaatcctacttctgggaatttaaagaaatatgcaaaaataaaaaataaaaaaataaaaaaaataaaaaaaaaaggtcacatgcacagaatcatccaccgcagcactgtttattagagttattattaagccagaagcaacctaaatgtcctacaggggatggacacttagtaacagctattaaaacgttaatgatcaaaattcaacggcaataagcagagttgcttataactaaacacaaaaagggtacacagctgcaaccacggaaaaacagttttgtaacagaaaagaatggaaaaagattacacaaaacaggagaatagctatgttagcctggtaaggttatgagtaacttttcttatttctaccctttctgtaatgatgtttcaccatttttacaataatctgtttcagaaagaaaaaaccagctaagccaaaataaacaagttaccttcttcattatcaaaatccgagacatttccatctgccacatccttctctttgaggtagttcagcaaaaactgttcgatgtcttcagctgtggtggtgctcttctcaagagctgctggtctttggttcaaatgacttccctcttctcctaaactttgctcttggaggtgcccaagattacctgtgtctgggaaccactgggctgtaaataaagtgttacaatgatcaccttggctattaacaacaggcatgagtactttatacacagaataagctctctgccctggcctgcacagcccccacatgattcagtccctgcctggctccccggcctcccagttgcccattaactcatccttttccagttcccccaatgcggcaagcattttcctgtttcagaactcttgcataggccgttctctgtgtctggaatacctcccatctacttcacatctggttaactccaaatcacttttcacatctcagaacacatagaacttgcccgataaggccctcccttgactcccctgtttaacttaggtcacttacatgatgtcttatatagcactctgctctttctcttcatatcagctcatcacaatatgtgattatatatttgcgtatctatttatttgtgtgtactattcagtgtctgagcctcccatcagactctatgttccattggtcaccactggaaatctaatatgcccagtgtgggttccagcatctctattccttcaaccaactcagctctaactgcaatcatttttgtatgacagggttccacaaagactcttaggagagcaatttgataactctctcaaaaatttaaacataaaccctttaaaccagcatttttttccaggatttcatcctatcgatatgctgaggcatgtccaaaatgacctacaaagatattgggtgctcaaagtatatgcaaaagaaaaaatacacaagactggcaaacacgtccaagtgacaaaattctgagtacagaatataccactcattagcagaatacaggctttacagagtcttgagaatggatggtctcaccttgtatttctcacataaaatgcttcagaaagctggccattttctctccaaagtcttccctattcggtggtgctcaaatacctctggtaagtcaccacagaataaacttctaacatcactgggtcccgtggttttcaaactgtgccttgaggagccttagggcttcacagaaatgtctcatggatcacaacagggagggcaccaagagacggtgggctacaggcatgggttccagggtctctattccttcaaacaactcagctctaatttcaattatttttgtatatcagggttccccaaaggcttcatttcaaaaaaggctcttaatacttaaagaataaaacaacaacaacaacaaatcccacagcctgaaaatcactgctctggtccagtgccctccttttgcagacagctgggaaaaaaactctgataacctttagcacctgctaatctccttttcatcaaagagcatctgcacagagcaagagcagcagcagatgggagatgacagggccaggcaactggcagtatcagagagcaaatgtgtgaggtgtgagccggaggttcctacacccagggatccattatgacattcttcaaactgcatccccagttgtctatcagctacttagtgcactctaaggcactggttcccaaatagttaaaacctggacccagcatttacactgctaagactagatatgctgcaaagattatttctagattcaaggctggtgacagacattaaaatgtctttgctcacaaatggcttttaaacatatgaaaagaagctcaatctcacgtttaatgcaaattaaaactataataaggtgctatttttctcctattggattagcaaagatcaaaagcttggtaatacacagtgtgggtgatggcgtggcaaaactggcactctcgtacattgctgatggagtttaaattggtacaacctcttagagagcaatttgatactctctcaaaaatttaaacgtaataccctttaaaccagcatttttttcagaaattcatcctattaatatactgagacatgtccaaaatgacctacaaagatattcaatgcagcattttttgtggtggccaaagactggaaatgaccaaaatgtctaccaagaaaggactggttaaatacactatggtgcagacgcgtgatggaatactatgcagccataaaaagaatgcagcagcacattctccaagttgtgaagtatgtgacataaatacttattttcaaagctaccctatttttttcttgttatgaataatcagctaaccagcagttgggattaagcagtaattaactgatgcttcttgcccttaccgtggcacctaatgcttttttagtcactgcatgtgacacactatgttaatgataactcaatttcctaaagctcttactgggttcttctaaggcctttcagaagttctctgagaacacatttccacacccatcttaaaagagtggacgtcagttagataattctatgacaaacagaaatgacagcaaaaggtactactctgatttatgagtgactataccaactccacctgagtactacttcctgttcaaaaagtgagtgtattctgggttatttcaaaactttcataaaagctagctctaagtttgcttctgttccaaggaagccccagagtcagtcttaaccattcaattttcctttctgcaagggagaccctctccctccacctcatttttttttttttaaaagcactacaaagctacacaggagtcttgacactcctccttcagagatgaccgaagacatcagcaatctaagacaattcaattttgaaggcccaaattcagatacctcttgagagatatatttcacagggcttttcttaacctacattttaaaaatttcaaattgaaacatagcataggtcgctaaagcagtacaggtgggatatatttggcccatggaagccagtcttagtctgcataagcaaccagtcagtcctatgaggggctccacgagggcaggcctaagtgggtcttattcatggctgactccccagtgactagcccactacacaggcttccaagtagctgcaaaataaaatccaaactccttctcttgctcctcaaggccctaccaggatttgtccttgcccttctttccaacttcatcttgcaacactctctacaaaggcctcttttccattctccaaagacccatgccccttcttccttctgggccttcccacctgaatttttatttatttatttttttttttgagacagtcttcctctgtcacccaggctggagtgcagtggtgcaatcatggctcactgcagccctgacctccctgggcttaggtgatgcttctacctcccaagtagctggaattacaggcatgtaccgccactcccaactaatttttttccatttttagtagagacgaggccatactaggttgcccaggctggtcttgaactcctgggctcaagcaatccgcccacctcagcctcccaaagtgttgagattacaggtgtgagccacggcacccggcctgaatgttcttaaaaataaatgtgatagccccctatgtgttgatgggcctttctcatccttcaggttttggctttagtgttgcttcctcagagaggccctccctgaccactgaacttataggagcctgtgtctgttacactgaggtgtttatttccttcacggtgtttatcagaatctgccgtgagcttgtctaatgatttgtttacttgtttatcatctctcttgcagtggcagggaagttccatgagtttattcgtctttttctctgctctatcttcattacttagcacagtgtctgacatatggcaggcactcttgaatgaatgaatgaaaaaggaacatttatgctgaacgtgaatgctcatgcatgaataaacaaacactggaaatggcattagctacagggcagtgcactgtccctgccccagttaccttccatgagaatgtttcttacaaggtcttggctttttcaactgacaaaatgaggccagtgaccattccaccttctcagaggctattagcagtactgagataaatactggaaatatgctctttaaataaaagggacccaagctatacagcttattattttctcattgaaagattgactatccagttgaaggattcctttccttataattgaagtccaaaattttgccattcctttttttttttttttttttttgagacagagtctcactctgtcacccaggctggagtgcagtggcgcgatcttggctcactgcaagctccgcttcccaggttcaggccattctcctgcctcagcttcccaagtagctgggactacaggcgcccgccaccacgtctggctaatttttttttttttattttttagtagagacggggtttcaccatgttagcaaggatggtctcgatctcctgacctcttgatccgcctgccttggcctcccaaagtgctgggattacaggcatgagccaccgcccccagccaattttgccattctaatagtggctaacatcttcggtaagcacccaataggatcagtgggaagaagagaaacttaaaccaactcacacaattaaaaggttaaaaggaagtttctagacctgctctgtccagtatggtagtcactagctacatgtggctattaaaattaagtaaaatatagaattcagttcctcaggtgcacgaaccacatgtgtatagtggtaactgtactggatagaacgaataaagattatttctatcatcaaagaaacttctcttagtaccgttctagacaatatgtgactgaataattcacgttatatctgttcttcattagcatagatactgctaactctatgcatcatcagaagcagtttgctatactggaaagaacaaaactgtcataaatcctgattttatcatttattaattgtgtgaccctggctaagtaggatgtcactgacccttagtttttcttatttataaaatagaaataatatttacatttattctgcagggtttataccctggcatagagcaggagctcaataaatggtagagattactgaaagtataaaagataaacagtgaaacccccccataacctatgggactggagagaaaatgattaaaacgtcctccatagcatcaccacaaacaatgcaaaaaacgaggctaagcaaactaggagactgagtcctgtcccccacacatcagcattaaaaagggctctcaatgtacctaatgctgccatcagagcatgcagaacgctgacaaaggaagcagctctcttatcgtaaaattggtccagggtggccaagacatcttgaaccacatctgccaccaaaggaagcaggttagcatctgagttccgcagcatgacttccaggacctttggggtatgaggatgcagagccagatgacgcagatttaaagagatcccattcactaaatagtctgaattttgattgatcaggtgctgcagggagtcgtagccacaagcacggcaaacgtccatcatggtgctggtagccacctgactaatgagtagggtttggtctccagccttctccagtactggataaagggctgacatcaagagcaaacagaagtcttttcctagtgcatatgcaaactggccaattccttccaactgaatgcatatttgccagatgttactgttcatggagcaaatagtgggacttggctttgagaaggctagaaaagatgtaacttggcaggtgtgttcaccagacgtgatggcttggaggcctgggtgctccatcatcagctcctctcccatttcctcagtttcaagacaggtaaccaaataccaattttcttgacttgtgtattcttcaagtatagatgtcacaatctctctcagttcttctgggtttgttttaatatgtttttcgtgaagatcctcaacctccagcccagcagcccctgtaaccagttcattaaggatcatggcagcttgcttccggtaaaccacagattgatggtaaagttccataaagtgatccacaagcaaataaagattcccataataaccaagtagctgacaaacctgcctcaagagcatgaagattctctcatcagtgaagaagcggaaatatctcctctggatgcggttccaaggctgtgtggctgaggtctttggagaagcattcagatcatcagagttccaacgccgttcctcaacaatcttgatgtcagccacgtctagctctagaacttggatgagtgctttggaaagccgctggagatgggccacagagttgaggacaaagtttatttttgggcccaagagtttcagataaccaagtaacaaggaaagagtagagaatttgccctggtcatcttgggagttcattaggcgaggaagagatgtggcaagggaatgcaggctttctgacaagatgtcagcgagggctttgttgcccaccactactttttgatctgcaaaatgtctcagaactttattgcactgggcttggatttcaggactctcatcatttactagtcccactaaggccttcagaaggggaccagcacattcgaccaatgattgactgcacttcaaaagaaggtcctccacaagttctaccagttccagtctcaccttccagtgtgggtgaacagaaacacactcaattatctttttaataaggatagtcaacttgtcgccagtcttttttacccaatctgcttccctgtaaaccatcagctctgctactctgtgctcaactgcaggttttgcttggacctttgagattcttttgagctgttcatcagccataatgaagctcactgtcttgtaaaagatctttagggaagatacgacaatgctgtgaccttgtttaaagtctcctgtgataagcctggtcagtgcagttgagattccaggtaaaaaagaggcaaacaaatcccccagctgcttttgttcaagttcatccaatgaccttggatggtcctgacaatcacactgcaagagtagaacctgtaaacattttaaggcagcaattttaatttgctttgatttctcctgttctgcaaggcctaacagtaaagatacagcaaatcctaaacgtggcagaatggagggctcataaaaagtcagaatgatgtccccataagctgagtgcattaatgtgctaagtccctggatcacagccaatttcaactcctcggacacagccgcaggtttttgggagctgggtgaatacagacaagcagagagttctgaaaagagttcctggagaagctcctgttctttcacacatgttgaagaaaggacaaatgtgaggcattccaccacactttggatcaaacgctctcttttgggacctggggtcttcagggtaaatcgcagagggaagaggatgtactgctgaagttcctgaagggcactgtcactcacagcttgtagtcgtgtctgcagatgctccacattctccactgtctgggtctttgtgagctgaacacagactggacgtaagacaccaaaggcctcctcaggagtatcaaaaactgccattgtgcagcagccttcccctcattgaggaaacatcctgcaggctggaggaaggaaactgttcagtaaaaatgtcaagttcaaagcaagtatgaagtgaacttgcattcattcattcaacagacatttacctggggtctatgtgccagccactgcacaaggcactaggggtgcaatgaaactgagccccctgtctagtgagggaagtacatgtacagttacaataaagtctcttcaggattaggacaggcctaagcttacagtcctgagtgtggaagtcatatcctgaggaagccaggatgggtctcacaagaaaattatgctcgaggcaagacttgagggaggaaggaataggaatctgtggactattttcaggagttcggattttaaccttcaggagtttggatttaaaccttcaggtttcatctttttaaaactgaggtatacatatagtaaaatgcactatcttaatgtacagctcagtgaatttttgtgtttgtatagaacaatgtaaccacttcccgaagtaagatacaaaataattccaacaacctagaaggctccctcatgtccttttgcaattgattcctatttcacctgcctggaggtaaccactcttatgacttctatcactacagacatgttttgcctgttcctgtcattaagaggtttaaagcaaggggtgatatggtcaactttatgcactgaaaagatcccccaggagcctgtaatatgggagaaggatcagaactgggtgagactgacagcaacataaagcgaaagggggtacccagagagatgggaaaactgggagcacacactatcacagaacacacaggagaagacagagtccagcaggatggaaagatggacagcaggcaggcaagcaggcgagcaggcaaaggagaaaggattacaggaaagcaaagaacaactcaatatccaagagtctgtctttttttttgtgaagagaaattcaaagtcatgggctgacagtgaacaaggagaaggataaacagagggcttgaggagagaaataaaagtctcaaatactccctttggggaagcagagcatgctgggaagacttacaaaagtgtggcccaagggtactgaggactgagctgagttggagaccataaatgtgtataactgtaaaatgtcggcattggatggaggcttagagatcatctagtctggtggtcttgtggtctttcttttttctctacttgctgggggcttttgaagagatgataagaaagtgcttgtgctgcttctgtctacccccaattccatgaacactcccgaactcggtggctatagattggcaggcaagtcgtgccagcgggcgtgagcaaggcctgctcagtccagaaagagagctggtgccaaatttccccatggagagactctgatacgctggagagtctggtctactgacctccctggaaccctatgaggaagggcactgttcgtcactgtgaggcttcgttggggtgtatctcatgctctctgtggccccaagaagccagagaagggaagaagcttgactcttccctatctcaggctagaaaaatgccacgcgtggcagccacaaagcttggctggggtctaatgacatcccatgtgcactggctcatacactgatgaaccagaggctgctttgccacctccctgcctgagatactggtagttggatcaagaagtaggaaagaaagagaattgcttaatgggatccagcagtcatgggtagaaaaagcatttgagcactccttgaggtggtgaatcttagattaacagaaccagaaaaagaggcagataagaattttaataataataataataaaaagaccaagttcaattatgacaccaaagatgtctcttagaattaaaagcataattttccacacacaaaaaagctccactgatgaaatttttaaaaagacagttaattgccaaaacccaattagtggcctagtagatcaagtggacctgtcttacccaaagcagggatgcagagacgcaaactgtgagacttggaggacagatctggaagaaccagcatgtaagggggaatttgaaaggagaaacatttcccttagctgcaaaaagatttatctggagaccgaaaagccttgaaggatacacacctgaccacattctggtaaaattccttcactctaaatatgaagagaaaaatcacatatgctttgaggaggaaatgacaaataacaaataaaagaaaaagaaactggctttgaactcctcattggcaacaatggatgctagaagacagtggaatagcacctacttactgcaaataaaggattgtggcccccaaatgccactgaagatgttcttctgtcaagatggaagaacaacatgcaagagagggtattacccacatatcccaccagaagaagacacttacactgctgaggaattttttttcttttagtatggagaattttcttcaaatacaatgtttaagtggaagcctggtatacaaaatggacaaaatcagagggtgtcttgtaaaatccagggtgaaggcaatggcctagggctctctctcttatttcactgtaggagtttcaagaagataacttggggtccgccccctgacagggtggtggttcctaaactacattctcagattatataacaaaaaccgtaatagagctaatgaaatgggaatacacagtatgtctaacattgacctcatcgctttctgccatattcccttggtgatttatagtcaagctagaaaccctagaatctctgttttctttcaccctctcttaatcccaacattccctacatttcatcaattccacccctttgacacctttcaaatctgctgatgatgataaccaatgtgtttcatattgggtcaactctcacagtttcctctctggccctttggcttgtttcttgccctcctcgaattcacatttcacaatgacacttaagtaatctttctaaaagaaaaatctgatcgcaattctctaggcttaattcttaaactgctctccatcctgcatgaagggcagatacttctaggtagaagctatacctaagcattaccatggcatacggggcctttcaccatcaggcttctgcctgtcttgccaacctcatttttcattattctaccactttgatctctaacctgcaatcatgtaaaatttataaaacttgcaattttctaaacaggtggtgctagttcacatttgtctcctttttcctacccctgtacacacctctatgacagtatttggcatgctgtattatttgtgtatatgtctgttttacctagtttagactagaggctctgagagggcagggcaatcctatacctagaagctacaagagcatctggcacatggcaagccctcaaaaacatctgtacagattctgcttccaagtaggatatagtatggtttggcaggctaatactcctgccaatgactagaaaaagccaaataaattacaaaaatcatttcttaaagcatccaatacttgtggaagcaacaaggactagatggactaacagactgagaatgttcagagggaatcaacaatcaatagcttgtgtgtgtgtgtgtgtgtgtgtgtgtgtgtgcgcgcgcgcctttggtgtgtgcgcacgagcctttggtgcatgtgttgatcctggacgtgggcttgggattagggtgtggttatcattggggaaagagaaaccacaatgctttcgatggtcacctggggctggacagacaaaactgcaatcttgagggacctccaaatacccaacttctggaagaaggctgctgctgaagacaacccagtagagattttggtattcttcaaagctggggtaacaaagctggagatttgatggactcgaaatacttacttggttggggtcttcctcaagacatttagtcaattttgaaatgatgtgaagtagtggtaggctaaataactaagctgaaaaccttaggggcagaagtgaacctcctaaaggctttcatgtctaaggagacaaatagcctattaggctttcaactgaaagccctggaggaccatactctaataaggatgaaccaaagtaagtttggggcttaccaggattgcaacccagcagtgacctagctcaatccctgaaatacgtcagactagactgaagtatttaattaacagaagaaaggggcaaaccttgatggtggaagatatatgcatccactatgattcttttatataatgtttggtatataataagttttttaagcatgtgtggaggtaaatgcccacagctagtaatcaagagaaaaaacagacattagaagcagacctatggatggcccaattactgaagtttagtagtcaagaactttgaaataaccaagattaataaagtcaagaaacagaggaaaagaccaaagtaaatgaaaggataaataattttatcacagaattggctgaaatctataaaaaaaatcaaatggatactttagaactgagaactacagtatctataattaagaatttaatataagatattaacagtaaattggacttagcaggagacaagattaatgatttggaagataggtcaataaaaaatattcaaactcaattagaaaaatgaatggtaaacacagataagaacataaaagacgtggaataaaagacgtgaataaatgagtctcagaagacagcatagagcagaagcaatactaaaatgttcaaaacaaatgaaagagatcaacccacagatttaagaaactcagcaacccaattatttggccaatacaaagaaaagaacacacagacatcatagtcaaactgctgaaaaacaaagaaaaagaggaaaaccttaaaaagcagtgaagcaataaaaatgacagctgacttctcaaaagaaatgacaaaatccaggagtcaatagaatgctatctaaagaaaataattcccaactttgattttttttttttttaatctatggactagggaaccaactttgaattttacagcctataaaaacaacatctttcaataaaaaggtaaggctgggcatgggtggctcacacctataatcccagcactttgagaggctgcggtgggtggatcacttgagcccaggagtttgaaaccaacctaagcaacatggcgaaactccatcgctacaaaaaatacaaaaattacctaggtgtggtggtgtgcactaatagtcccagctgctagggaggctcagttggaaggatcgattgagcctgggaggttgaggctgcaatgagctgtgattgtgccactgtactctagcctcggtgacagagtgagcaggtctaaaaaaaaaaaaaaacaagggtgaaattcagatatttacaacaaacaaaacctgagggaattcattgctatcagggcaacactaaaagaaaaaacaatgtaagaaaataaacctagacagaagcatggaactataagagggaatgaagaaaatgaaataggtaaatataaaaaaattaactgtacaaaacaataactattatgtcttctgtagtttgtgtatatataaaactaaaatgcaagacaagaataattcacaaaaggtagggagggggaaggagttaagtgtctaagagtctagtagtgtaatgaagtgataaaataatctgtattagaccataacatgtcaagatgttaaatgcatgttgaaatctgtagagtaagctctaagataattgtaaaagaatagctacctaacaagattacagggcagtaaaaaatgggatactatttttgattaatcaaaaaaagggcaaaaatgcaaaaaaaaagaaataaaactagtgagccaaattgaaaacaaaaagtaagatggcagacagaagtctgaagtacaactaaaacagcgattacatttgtgcagagtttctcaacagcagcactattgacattttgggtgggataattacttgttggtggagggctgtcttgtgcattgcagggcatttagcagcatccttggcctctgtatcttggccatccatctatctgctgctagtagcaccaacccaggtgtaacaaacaaaaatgtctccagacattgctagatgtcctgtcaaggacaaaaattgtccctggatttggtaccattggtagagtcagcataatcctaatcaaaatcccagtaggatttctgcagaaatatgatgagtctaaaactgatagagaaatgcaaaggacccaaaatagaaaagacaatcttcaaaaataagaatgcagttacagaacttacactaactgatttcaaggtttactataaagatacaataattaaaggacagtgtatacttggcataaagaaaaatgaacagaacagagttcagaaatagaccacacatagaatagagagtccagctacacacctgacaaatatgacagtaaaatgaaggggtgaaaagaatggccttttcaattaaaggtgctatgtcacttggctactcatatgaaaaaaaaaaaaaatatatatatatatatatatatatatatatgtatgtatcttgattccatcacatcctatttaaatgtgaaatgtaaaacaataaagctttccaaaggaaacagacaagaacatctctgtgatcctggagtaggcaaagatttcttaaataggacacaaaaagaaaaaaactgataaattggactaccttaaaatttaagaacttctcttcatcagaagacactattacagagtgaaaaggcaattcaaaaagtgacagaagatacttgctatatatctgacaaaacactcatatctataatatacaaaagatttttaaaaaatcatttaaaaaaggaaagacaacctaacagaaacatgaaaaaggacctgaatagacatatcacaaaaaaggatagccaaatagccaataaacatatgacaagactttaaatatcattagtcaggaaaatgcaatttaaaaccacaatgaaatatcattacacatccatgagaagagctaaatttaaaaaagggaaaatactaggtgctggcaaggatacaaagcaactaaaactctcattcaatgctggtgggcgtataaatcagtgcagctagtacggaaaactcgttggcagtatctattatttcaaaggtgaatatatatatgctctatgatctagcaattccattctttgatatatacccaatagaaatgtacatataagcttatcaaaagatatattctggaatttactatacacaatcaccctaaaatgaaaactacctcaatgcctatctgtagtagaatggataaataaactgtagtacattctatgaaatactatacagatgaagatttaccacaatcagagatcttcaaaagtctgggttataggctcagaaatatataaaccagctttctctaaggaagacagcataacacattgctactttggcataacacattgctactttgacatgactataaaaggcaatcatatagctttatgggatggccatgaaatcacagttgtgtgacaatatgtcaattacagaaagaattgtttagagatttagagccttaggaatcctacattctattcctataaaatgcaaccctgattacttagagtggtgctgcaccaaagtttgatatttataaccaacagcaacaggggcattctggtccagaaagttatactgggatgaggcattcagaacaaacggattctctggatgagtagacaaaaccacccagagctcagagtgactgaataaacatgaataaacataagcatgagcaaacagttcttgactgctaatggacacctaatccctttctagtttagtggccctccactgtggtcctggaaagtagttggcaagtaggcactggagaggtgggagatgagatctgtgattggacagcatgaatgaactcactgcccccggcaagcctattcccctcccctctacctaacttgtaacaggggtgggctataagtaagatccctgggccatggtgtaaaggtggtgaagacaaatggaacaatctgtacaggagacggtgttatactttacagatacttagatcccaaggtacttactgtatcacacaatcaagaagtgaaaaagggaggggaaaaagtgcaaaaggaatttggaaacagaatgaatacgaacaaggaagagggagaaggatctgtgttgagctggggtactatacactttgggctatgtgagaaggctgctcaaggtgcaaggcctgtcacaagcaaaggccagaagggagaaaagtcatagcacctaataaaggcagagatgagacagagatgccattgtggcaggtgagccaggcctcacacatccattcagatgaaatcatttggtcagggcctttgcacttgctgttctctcccccatgtcctcagggctcgctcctttaccactttcagggctttgctcaagtgacgccttgtctgatcacccctattaacactgctacccatgcttactcctcatctcctttccttgcctttaaaattttcttccttagcacttcacaacagctgtcaaaccagatcatctacctgtttgtttactgtttctctcctttcactagaatactagaatcagtgatttttgactggtttcttaattgcttttggcacacagtaggtattcaataaatgctcattgaattagtggtcataatgcaagatctggttctgtcatttgtagagtgctgatatcagctattccgaatcggattctagataaaacctgccatgctcttcttctcttggggtgagtttttcctacaggtagttgatctcgtctacactgggagggtcctgctagattcattctgatggggtaatcataattctagatttggttgtactccagcccacttttagactatttccagaactgggacagagggaacatgtatattttctctctatacatgctttcccttctgaagaacaagtcgtaagatgaaataggtacttgttcaataatccatctggttgcagtgttcagagtacactggaggactgatctgggttctagccctggctcttacagtacctggctgtgtgatttccatgaattttatcttcttcaatataaaataaacttatggataagaaaatctccaaaatttccacctttgaataactagcctatggaaagaacgactgggtttagagcccagagataggagttcagatgtaagaatcgccaatacaagttcttgaataggaggaaagcatttttcttttgttgttgaaaaaacccccatcatacatcaggcaatgtgctaggtatttattgtattcctcatccacaagctgagcagcacaaggctcagagaggttcagtgatgtccacacagcaagcaggtgtcagacttgggattcatctcaagcccgcctgactccaaaggctgtatgtactctttccactataccagaggttcccaacctggctgtttatcagaatcaaggaggaacaatttaactacagattcctgggctccacaccagatctacggaatcagaatcaatgtggtgggggagcagatatgcttgggaatctacaattttaaaactttgcaaggtcagtcccatggccactgaggtgtgggaaccttgcactgtatatattctctatgtgctttcccttctgaagaacaagtcgtatgatgaaataggttcttgttcaataatccatctggttgcagtgttcagagtacactggaggactactatcttgggttaaaatgatgagtttatttctcttcccagctgaatggtatagtgttacagctttacttgtggtttccccagcatctgctgctgtctgccaagcagttcccactcactgtttgtttaataaataagtaaaagaagctggataaacattaacccttcagcatattctgaagttttgttgattgctactcatctttccctctatctagaaatgtttccttagcatatactatttgcccatacagtgtgctaaattcttgacaagggaagagagatacaatgttaaccagagaggctaacactgtaagggaagtgtactgcagaacaggaagaacatgcggaggaggggaatcaaggagacttcccatacatatttccggaaattactctaggctcacataatgcttagtttacagctgtcccttatagaaaatatgtgaagctgtggcttgtattacactaatactatgtgcctgttccctccactagacaggaccttttttgctagacagtacatttctaaaaaagggattcttaacttagaagagggtgtacacagaatatatatacaaatgacctcctgccctcccccgatttatgacctggcactggaaactgggtaagttcttcaggtaactaaagtatgtttgcatattctacttatttataaatattaatataaacaaaaattctgttcacacacacacatgaatacaaatagaaaacttaagcttctcgggagatggagtaggcatacatttccctattctttttgttaagtataactaaaacccctggacattatatataaagcaaatacaagaagaaagcagactggttagggaccccagaacctggggagtgacacagtgctgagttccccaggttttctttctgcctcatagacccaagccctggagctgaagaagctggcaacctggaagcaccaatgggcacagacacaaaaaccccaacaaaaacctgctctctctagccaaaggagtaggggaatgggcaccctcgcaagacaaaaaacttttggacaacaaacgctctactccagccaaacactacagaaaataaggcggcctccacccacggtggcaaaggctgattggagagcctagactcccactctcataagtctgtaatgaggcaccctcaacactcctgcagggatggtgtgaaggaagacaaagtaggagcaggcattccatccccaccagccccagtgtcagtggagaccacacggggagcctaaacttccacttctacttggcagtaatgaggtagcatcacaggacacctagtcaggactttcaccactgcccagtggtaatgatgccacctccactccaatgtcagtggagaccaagtggggagttgggactgccacacccacccagcagtacacctccactcagcagtagtggggagacctttttcttgggtgtcaatggaggctgagtgaggaacttggacttctacctccacctggcagtgatgaggtacggacccccttctcctaccaggaatggtgtcagagattgtttagtctaaacattagactaaacagcctaaacagacaaaacagcctcaacagatgtctcagaacattatacagaaatgtccgaatctcaatataaaaatcactcataccaggaaccaggaggaactcagactgaatgaaaaaagacaatcggtatgccgtggtggctcacacctgtaacccgagcactttggaaggctgtggctggtagatcacctgaggtcaggagttcaagaccagcctggccaacatggtgaaaccgtatctccactaaaaatatagaaattagccaggtatggtggcgcgtgcctgtaatcccagctacttgggaggctgaggcaggagaatcacttgaacccggaaggtggaggttgcagtgagcagagattgtggcatggcactccagcctgggcaacaagagcgacactccatctcaaaaaaaaaaagaaaaagaaaaaaagacaatcaacacatgtcaacaccaagatgacaaagagacaaagatgtcagaattatctgatgaagacattaaaacagtacgattaaaatgtatcgataagcaattatgaatatacttcaaacaaatgaaggaatagaaagcctcgaaaaagaaaaagaagatataaagaaacaagtgaaaattttagaaatgaaaatttcagtaacaaagaaaaacttcagtggatgggctcaacagcagaatggagggaagaaaaaaatctgtgagctggaagatggaacaataggaattacccaatctgaacaacagagaaaaaactactgaaaaatatataaacagagcttcagggaacctgtgggaccaagagggcaggctgaaaaagtactcaaaagaaataatggctgaaaacgccacaaagttggcaaagacataaatctatatatcaagaagctgagtgaaccccaaagaaatttatcccaagactcttcataatttaatttctgaaaactaacaacaaaaaatattgaaagcatccagagaaaaattataccttgtctacagggaagaaacaatttttttttttgagacagagtatcattctgtcaccaaggctggagtgcaatggtgccaaatccattcatagcaacctccgcctgccaggttcaaatgattctcctgcctcagcctctcaagtacctgggattacaggtgggcaccagcactcccggctaatttttgtagttttagtagaggtagatttcaccatgttggccaggctggtctcaaactcctggcctcaagtgatccacccaccttagcctcccaaaatgctgggattacagtgtgagccaccatgcccagaggggagaaaacaattctaatgacaatctcatcagaaaccatgtaggccagaaagaagttacacaataattttcaggtgctgaaacaaacaaacagtcaacgcagaaccatatactcagcaaaaaatgtgcatcaggaatgaagtggaaatcaagacttctgagaagaaggaaaacaaagagaatttgtcaccagccgacttactgtaaaagaatggctaaagaaagttctctaaacagaaagaaaatgataagaaatcctggaacattaagggggaagaaagaacatggcatacaaaaatatgtgtaaatgcaacgggctttccttatcctcttgagttttcaaaactatgtttgacagttgaagcaaaaattgtaatgccatctgacatggttctaaatgtatgtagagaaaatgtttaagacatttatatgataaatgggcagagtaaagagacataaaaggaaataaagtttctatactttgctaggtaaaggtaagttatgtacacacaatgtaatacctagagggaccactaaaagggctacatacaaagagatatactcagaaacatcatagataaatcacatggaattctaaaaaacattcaagtaacccacaggaaggctacaaaaagaaagcagataaatgaaaaagagaataaacagaaagaaacaaaatatagtcatctctcggtattcaccagggactggttccaagacttccatggataccaaaatcagaggatgttgaagtcccttatagaaaatagtgtagtatttgcatataacccatgcatatcctcccatatattttatatcaactctagattattacaacacctaacacaatgcaaatgttatgtaaacagttgttacactatattgttttaaaatctgtattatttttgttgttgtattgttatcttttactttttatttttttcaaatacagttgacccttgaacaatgtgggggttaggagtgccaaccccctcgagcagtcaaaaaatctctataaattttgactccccaaaaacttaactattgacagcctactgttgactggaaaccttactgataacataaacagttgtttaacataaattttttatgctgtatgtattatatgctgtgttcttacaataaaacaagctacagaaaagaaaacgttattaagaaaatcacaggctgggcccagtggctcacgcctgcatcccagcactttgggaggctgaggtgggtggatcacccgacgtcaggagttcaagaccaggctggccaacatggtgaaaccccgtctctacaaaaatacaaaaattagccaggcatgatggcaggtgcctgtaatcccagctactcaggaggctgaggtgggagaatcacttgaacccgggaggcggaggttgcagtgagccaagatcgcaccattgaactctagcctgggtgacagagcgaggctccatctcaaaaaaaaagaaagaaagaaaagaaaatcacaattactattcattaagtggaagtagatcattacacaggtctgtcttcatctttgtcttcaccttgagtaggctgaggaggaggtgggttggcagaagggaaagaaaatctgcatataaatagatggccgcagttcaaatctgtgttgttcaagggtctactgtattttcaatccacagttgactgaatctacagagacggaacccatgaatatagagggtcaactataattgtattaagcataaaaggtctaaatacatcaattaaaagattgagattggcggagtggatttaaaaacatgatctaactacacgctgtctataagaaactcactatgcagaattatagaggctgattgaaaatcaaaggatggaaaaagatattatcatgtaagcattaatcaaaggaaagtagaagtagctatattagcaccagataaagtagacttcagagcaaaagaaaaaaaattaccagagacagagtacaatgaataacaggtatatctactaagaacatactgcaatcttaaaatgtatatgctgtaaaatgtgtgaaacaaaaatggataaaactaaaaggagaaacaaattcacaatagatggtggtgacttcaatattcctctctcaacaatggataggataactagaccaaaaatccacaaggatatagaaaaaccaccaccatcaaccaacaggacctatgacatttatagaacactccatcctacaatagcagactacacattcttttgttgttgttatttgtttttttagacaggatctcactctattgctcaggctgcagtgcagtggctcgatgatggctcactgcagcctcaatttcctgagctcaagcaatcctcccacctcagcgttctgagtggctgggactccaggtgcatgccactatgcccagctaatttttgtattttttaaagaccgagtttcgccatgttgcccaggctgttcttgaactcctaggctcaagtgatcctcctgccttgacctcccaaagtgttaagattacaggcatgagctacagtgcctagcccacattcttttcaagtgctcatagaacataagacagatgattatcctgccataaaacaaacctcaacaaatttaaaagaactgaaatcatacagagtgacattccccagccacaatgaaatcaagcttgaaatcactaacacagagataacaggaaaatctccaaatacttggaaactaaacaacatgtttctaaataatccacggaacagagaggaaaccttaagggaaattagaaaaaaaatagggaaatgaatgaaaatgaaaatatgacacaccaaaatctgtggatacagctatagccatgctgagatgtaaattaatagtactaagtcatatattagaaaaggggaaaagtctcaaacgaaaaaggtaaactcctaccacaagaacctagacaaagtagagcaaaataaagcaagcagaagaaataataaggagcagaaactgacaaaactgaaaacagaaaacacagaaagtcaatgaaataaataactggttctttgaaaaggtcaataaaattgacaaacttctagcaagattgacaagggagtgagtgagcaagagagagagagagagagagaggagagagaagagacgagacactgatactggaaatttccaatatcagtaatgaaacgggacagtactacagaccctgcagacatcaaagggtaatatgggaatgctatggtttgaatatccgtcccttccaaaactcatgttgaaatttaattcccaatgtattgagaagtggagtctttataagccctcataaatggattaatgggttatcatgggaactggtggctttataagagcaaaacagacctcagctagcacactcagccccctggccctgtgatatcctgcactgccttgggactctgcagagtccccaccagcaagaaagttttttacctgatgtggccctgtgaccttggatttctcagcctccataactgtaagaaatacatcctttttctttataaattacccagtttcaggtattctgttataagcaacagaaaacaaagacagggaataccacaaatagctttacccatataaatttgacaactttgatgaagtggttaattcctcaaaaaacacaaccacaataggaaagagattattttaacagctttataacttttaaataaactgaatttgtcacttaaaaactccagaaaaaaaaggaagaagggaaggaagggagggagggaggagggaggaaggaggaaggagggagggagggaagcagggagtggagggaatctccaaaccaagatggtttcattggagaattccgccaaacatttaatgaagaattaacaccaattctgcacatactcttctagaaaaagaagaaacactttccaatccattttataaagccagtattatcctgataccaaaccaaaggcaatacaaaaattaaaaaaatctatagaccaatttctctcatgagtatagatgcaaaaatcctaaagaaaatattaggaaattcagcagtatgtaaaacacacacacacacacacacacacacacacacaccatgataaagtggggtatatttcagagatgcaagactggctcaatatttgaaaatcaattagagttgttaatactaacaagctattaacaagcttaagaagaaaaatcacataatcatatcatcctcacctttcagacctctatatgttgaagaatcctaggactcagtctctttttacaccttattccgttatgactctcacatttttatctctaacccagatagctcttccttgaattccagacccataaacccaactgccccttagacatctatactcagataggcatttccaaatggacatgtccaaatacaaatgcttgctcttactctccaaacccactcttttctgtaattcagtaaatggaagcgctattcttatagttgcttaggccaaaacccttggagctatctcaactctcatatgtctttcacaccccatatccaatctatcagcggatcctgttacctcttcctctaaaatatccccagaactgtccctttcttaccacttccacagataccaccctggtttgagttatcctttcacctgggttactacaacagctgccaaactggtccttcctgcttctacctttgcactcttactgtcttattttctacctaacagccacaatgctccttctttgtgcaaaactgcccagtggacttcatttcattcagagtaacatctaaagtctatactattgcctacaagtcaccatgtgatgcagtcccttcgtacttttctgaactaatttccagccacccttctagttcatatcactccagctttattgtcctctctgctgttgctccaaaatgccaacaatggtataaacttggttttccctcttcctggaacaatggcatatggcttgtctctcaaatgacatcttatcaatgaggccttctctgagaagcataagtaaaagactacccacctacacatatacattccttatcctccttatctccttgatttttattgaagttacttaccactttctgacttattctaaacttgcatgtttgtttttctatctttctcagtagaaagtaagttcctgagaacgtggattttgtctgttagcttagaagagtgctttggacataggtgctgaaaaattattttccgaatgaatgaataaactattggttcaggaggcaagaatttgggatcagacataagataaccctaatttgactcctggctctgctatttcctaactatgtccaagtacatagggtacttaaccatgctttacattttctcgtctatcaaatagtgattgtaataatttcaactcctaagactgatgtaagaattaaatttaaaaagtatgtaatgtgcttaatagacagtgacttggtataaaagtgctcagtatatgacagtgttattaatatggaaagatgatctagatttcgacacaaaagccctcagttatgactagatactcactgtatgattttaggttactcacctcttttacactaactcacttgataaatcaggaactggggccaaaaagatggctaagttgcagccccttccctcaagtcttagtaatgtgatcttgggtaggtcacttaacctctctgagcctgtttcctacgctgtccaaagggggataatataatacctcacagctttgttgtgaggattaaatgagttactgtgtgggaattgtgtctagcacatagtaacctctcactgcgttagctatgattatgattccagtctggaggaagggtaaaagcatgtaagcaaagaactgcaatacagtgcaataagagcaaaagcaggcatcaactagaagaacgtctcctaaactagagtctgcccacaactaggaagttataccacgatcaggaaattttaaaaccctcttatgtctataacttaactccctaccatcacccccgtggcagtaagaaaaacaaaatttctctgctgctttgatacctgggatttaaaacttaaaaaaaaaatagggtcaaggtttagagtctcagatagtgttttgttttgtttcagagaagagtctcgctccatcgcccaggctggagtgcagtggcacgatcatagctcactgtaacctctaactcctgggctcaaggtatcctctcgcgtagctggaactgcaggtgagcgtcaccatgcctggctaattttcgctgttacccaggctggtcttgaactccagtcctcaagctatcctctcgcctcggcctcccaaagggttgggattacaagcaagagacgttgcgccaggcctcaaatagtgtgtctcaacatgaggtcaacagacacattgggaaggctaagttagttccctccaccttttccctaaagttaacacctcacttaagttcgaaaaagtcaactggacccgcagacggcaaaagcagcacgtaataataccctgagtgagaacccacttaagagccgagagcccaaatgtgtgtttcatgacggcgctgttacagactaaaaggtcaaaacaggacattaaagggtgctccggggggctgagtaggagctcaccaggtgagaaaggggatgtcactttcggacagagaacgagcgccagggcgtggaggcgtgaaaagggcacgtgggtggcttggaagaaccaaaactaagtgttttgggggacagccagagagccgaacacatatggaggaaagatgcggcctggggcccgccagattagaaaggaaatccccctcccatatccagatcatgatctctcagactcaatgtcccctcaggatacccctctacagggtcccagctgctgggctccctctggttcccgccactcttcccttacctcgtcttccagcctttctctcactctcccgcctcctctgcctcgccggaagtgacgcgctaagtagcgcgccgtatcgcgccagaaaggttccgagggagcgggaaaaagggttccggcgagatccactgcgccggtgtgcaggctcgagcggtcaaagctctttccgggggcccggggaactactctccttgcctcgctctgtctccttcgaagtgctctgcgcgaggttcagagcggccgccgcctccaaagggacggttttctagagctccgacgcctctcggtgcccctctgctccggcccttgccctttgacctcgctctcgcggcagggtgagaggtcgggtggccatcttgtggcggcggcgcgggcggctgttactgcggagacccatcccctcccccttctcgcacccctggcagtctgtcagtcggtaaaaagtcccgcagcctgtcaggtgaggccccggcctcgtgccgtcgctcttcccgccgcactgggcggcccaggccgctccctgccgggcctcactgccgccaccatgtcctccttctctgagtcggcgctggagaagaagctctcggagctgagcaactctcagcagagcgtgcagaccctgtccctttggctcatccaccaccgcaagcacgcgggacccatcgtctccgtgtggcaccgcgagctccgcaaaggtaaacaccaaatccccaccccctggacggtccccggattgtcctctcgcccacatacaacctaggcccctctaagcctcttcattgagccttgctttccaggcctgatcgagcttctgagatgggagacaaagttagccccatttctcgaagaaggaaactgaggcccgggaaggtttaaggtacttgcctgagggtccacggactgggactcaggtgtccagacttctagttcatcaagccattttcccttcagtttccccctgacatttgtggctgttattatctcggctgcattcactgccgtactggccctagcatgtcgggcccagtgctgggtatttggagtaaaagccagtgggctccggagtcagactctgcagatcgagtcctggctcagctatttgccagctgaataatactgggagagtttcttcatctccctgtgtctccgttttctcatctgtaagagggaggcaaggatagctaccccttacaaagcctttacttcataccagtcactatactaagacctttgtgtgtatcctcgcactcagtccttagaacagccctgtgaagtaggtagtctctcccatcttaggttaaggggccacccagaccttacctctcctctcctctcctctctcatgcagttgtcattgatttcaggccctgctcaggttctgacagacaattcattgaactcattctgttatgtgccaggcactggcttggacacttgcagcatgttgcctctgccaactgcctagaatttaagcctgactttgccgccttactgaccccagcaacttaacctgtctgtgccttaattttcttatctacagaatggataactgaaatttactatgtctttattacatgcgaagtgcagtactgatatctttacatacattgccattaaaaaaaattctcggagccctatgaagtaggaactttgcagaagaggaaaaactgagactcatctcgtggtgaggagtaaacgggataatccaaatgaacatttagcatggggtgaggcacagtgtaggcattcagcagattatggtgagatgagacttttgattactcactgtgaggcatggtctttaccttcaagttgcttacagtctggtggggaaagatggacacctacactcccggatgagtttcataatggaagactgaagaaatgaagctcagagctgctccagacaccctatatgtggtaggcctttatagcgaagtggctttacaagtgttctatactatctgtgagttggggacaccacagatgtcctgctctacaggtgaggaaactgaagtggctaagtggtattttcaaggctttcgaactgaacaggctcagactacaacaggctggcaaacaccaaaatcttcatgatttttttcaggagacccagttctagccctttagcagggactgcccccaaatatcgcgtactgtactgagatagggatcccctcagcccttcgggcagttccgggaagaggtagagcctggagtttatggggccttcttcatgtaccccactgtgccattcagaaattatttgaagagtgtgctgaaatgtgaattgccactgtacagaattctattgggtgggacctcaagaggcagttaaagtccatctcaggtgtcattttttttgtttttttttttttgagatgggggtctcgctctgtcacccaggctgaagtgcagtggtgcgatctcagctcactgcaagctccacctcccgggttcatgccattctcctgcctcagcctcccgagtagctggaactacaggggcccgccaccacacccagctaattttttgtatttttagtagagatggggtttcactgtgttagccaggatggtcttgatctcctgaccttgtgatgcccccgcctcggcctcccaaagtgctggtattacaggtgtgagccaccacgcctggccaagtgtcacttcttttgtgacactttcttgattccttgcctcaccctagttgagttactgaaaaaaagcaaattagagagtacatttgtgtatgaagctccgttatccctaatcttacgtggtaaagccttatgttgcaagtaggctagcattattatcctcattttatagatgagatgataaaggtatagagggattaagtgccttgtccacagacatacagctaggacatgagcccagggctgcctgatgccaaaatgtgttctttttcatgtactcagtgcctcaatgcatttaataagtgaaggtggtcacctgactgcaatcaaactgtggtgctttcatttattagaattaatgagtgcctcccaccccatcataccagtttagcatttaatttgttcctactagctgttcatttgaactggttacatctttgtcattagattatgttttgagagaggaactagaccttcttgtttatttgcaacaccacaggatatcgcgtggtgcctgttatatagtttaaaaataggaattaaatcatggtctctgatagaattttcgtggttgagtaaaggatctaaacagcgctatccaatacaactttctatgatagcagcataaaggatataaacagcgctatctaatacaattttctgtgataatagcaatgttttctatctgtgccatccaacaggtagccgcttggtatatgtggctatggagcacttaaaatgtgtgactaaggaactaaagttttaagtagatagaattgaaaatttagtttccagtttttaccagctgcaattcaggtgttccaatagccacacgtggctagtggctaacttactggacagtgcagagttaaaaaaagatgctcttccaagcatcaatacctagcttccgaatatccaggcttatttcatgaactgaaaatgcccccacactgaaagaaaaggattctgtgccctaatgttcagattgattagccctgtaggttctacctagggtgaagtcattttccgtagctgagatgctcacagactgtctctgagttgccttcaaaatatatgagatttataaaaattaactttttttcttgcttaaatacttctattcctgatgtgttgtctttccattttctaggaataatttttaatttatcccatttgagctctgttctaagtagaacgtctccccttctttatggactagttttggtgtaaagtgctcctaaatgaatgtttttaatggtgttttgtatcttggcctgaatgtaggtaatgggcttttattgcagaattactttaagactttctgtagatgtcaaaaccagccaaacaagtgaaaagttttgattaaccagttgtttaaattttactcaacaactagtttgaccagtttggaatggacatgggtagtgagtgaaaggacctatttctgtcgtataggaaggacatctgaacaagtgagttgtcccccaggattgggatggaggggtgtgcatgttgtgtgtattgtgactgtgtgtgctcaagagctctagggttttgtcatatcaccttgacacacatggtgcttatgttgactgttgaggatgttgaatatggagggatacagtttatcctaaataaatccccattgttaagttctggggtgatgaaaattaattggcattgtaaacagtgaaaaccttgggtctcaagccccttagataccttgtttgtctactgagaagtatatatcaggtcttgaatgtccacactgacattttacaatatggattctaggttttttttttttcaacataaagtgtatggaattttaaagcttcacttaatgaaatttgctttgttgaagttctgttttgctttcgaatctgctaacttgcatgggattataggtgtagtagtttcacttacatcaactttgcagagcaaggtttgctttaacaaaaaagcacgttttgccataatcatacctttgtagcaacagtagatattgtaactactgacacttttgttctgcttttgaataataattagaaagttgaagaaagctccaggttcctagtattcttatcagttggccatctaaactaggttattaccagaaggttaagacaattcagggtatccatatttaattttatgagcatttaagacatcagtttcatcagtttaaactgtaatgtgctattaaaatcatgtttttaacttgggttactctcctgtagctacatttttttttttttttttgagacggagtctcttactctgtcacccaggtgggagtgcagttggcgcgatctcggctcactgcaacctccgcctcccaggttcaagtgattcgcctgcctcagcctcccaagtagctgggtttacaggcgcctggcaccacgcccggctgattttttttgttttgttttttttttttttttttttttttgagacagagtcttgctctgtcacccagactggagtgcagtggtgtgatctcggctcactgcaagctccgcctcctgggctcaccccattgtcctgcctcagcctcctgagtagctgggactacaggcgcccgccaccacgcctggctaattttttgtatttttagtagagacaaggtttcaccatgttagccaggatggccttgatctcgtgacctcaggtgatccacctgccttggcctcccggagtgctgggattacaggcgtgagccactgtgcccagcctcctgtagctacattttaaaatgtcagatcttatgcctgctatgtcagacatatcaatgctttgtacatttcaaaagaaacaactggtttcagagagaaatagagttactcaggtgtgttaaggttgataaagagcttgtgtttttcaggtactttagcattggagaaaactttgtgttttgaaacatctaattatgttcttatttatttcttttaaaagaaaattggaaccaaaaattgtagggatgtaactttatagttgagaaattatgtgcatagaagccagggaattcagtaatgttccccaaagcaactgtaactcagacatattgcacgaggtttttatggtttaatatatgataccatatagagtaatagggaataaccacatttcatataaataagagagaattatggtttttgtgaaagccctaattttgcatatctagatttcacacgtgtgtaaattttcaataagagtgtagtgttaatgtatacttgtatttgagctaatatctattggtgcacctagagattcttctatattattgattatggttattggagtatcagagaaattctcagtttaggagcaaaattacaagaaaccttttttttttttttgagacggagttttgctcttgttgcccaggctggagtgcaacagcatgatctaggctcaccacaacctctacctcccggattcaagcgattctcccacctcagcctcctgagtaactgggattacaggcatgtgccaccacgccaggcaaattttgtatttttagtagagacggggtttctccacgttggtcaggctggtctcaaactcccgacctcaggtgatccgtccatctcggcctccaaaagtgctgggatgacaggcatgagccaccacgctcggcgaaaccattttaaaattgaaacctaactcagtcttttttttttttttttgagacagagtcttgctctattgcccaagctggagtacagtagtgcaatctcggctcactgcaacctccacctcctgggttcaagcgattctcctgcctcagcctcctgagtagctgggactacaggtgcccaccatcacacccggctaatttttgtatctttagtagaggtagggtttcaccatgttggccaggctggtctcaaactcctgacctcaaatgatccacccacctcgtcctcccagagtgctgagattacaggcatgagccactgcgtccggccaactcagtctttcattctgaaatatttgataattaaaagtgagttagaagttgctcatttttgcagtagaataaataaaagccctagtttcaacattaacactgactgcttatcctttaggaattctctttggattatcttaatttttactatcaattaattaccctggtttaaacaacacagcaatgaagatggcccattctttttctttttcttttttttttttccgaaatggtattcccaaacctattccttaggtggtctttttaaacatatctacttgaccccccaggtagataatacttgtcttaatgtttttttaggagcagcccagggcaaaagaattgtgaattgagaatttctttggtgtaagttaaattcttttcttttctttttttcagccaaatcaaatagaaagcttacttttctgtatttagcgaatgatgtcatccaaaacagtaaaaggaaaggacctgaattcactagagaatttgaatctgtccttgtggatgctttttctcatgttgccaggtatgttgtctgttttttggatttgtttttaaattcattgcctttcccacctttttgttctttccttttctgtgatagcctttgtaaattgacaacttcctactttacagagagttgtggaggccgaattgtggttttatgttttgttgagccctcaagaactatcgagacatgtaaacattctgatacatttgagagattcagcctagcattatctttcttctagatatattcattttcattttttgaatttatttcttggttatggtattttccttggtttggttgagttgtctcatcagcttatgatcaaaaaacaaagctaactagtaagggaaccttttagtaacataacttaatagcaagaaattaattgccaaatgccttcctttttatttccttctggatttctagatgtctagtttactaaaaatagtaggcattactgtaactgcaataatagtaattattagtgtagaaagtaggtgtttgctctggctatattgtattaagcctggtgctgttgtgttttgtggcagagaggagtggcactcatacaactaataccatagaaagcatacattggattaaaagttttataaattactttacttcatgtaaaaacaaaagctttctgtgggcttaaattaggtgcccaggaaaagcaaagaaaaactatcgttcattagaatattatgtttataagtaaatatataaacagatatttgcaaaaggaattgggaaacatgaatgggagactagtaggttaaacataaattgttactaggtctaaaatatagtgaaaggccttaaatgagaaatgaagtcctgctttcattgcaggatttgaaaagtttgaaggaataaaattagaaatccaagagaaagaaatgacacctagctttctagagatgaaaaagatggtttttgtggataagttacataactggctcaccttttgatcaacatgggcgcaagtagcaaaatgtgttattaacttgaaaaaaatactgaatcttcataacagagtaagcttagaacagactactagaggagctatctgaaatagacagattttcttgctttgatgagatttagttcacagttgcttagaaattgatggtagctctgcctcagacactatgtgagtgaccttggatgtgttacttaactttttgagcccaaatttcctaactggctaaagggggaggataccactccccctcataagagttgtgagggtaaagacagacaatatgtttaaaagtatgtagtacaatgcctgttccacatttgctcattcattggatcatttgttttttcctatattccaggcacctagtaaagtgtctggcacagagctgctgagttatgtagcttgaaggaataccatttatatagcctccatgtaagtggtgtcccaggagctgggcaacattatggtctgccctgacacagtaggcgttcagtaaatatttgttaaatgagttaattaatgttaactcattatggaagagatttggtctagggagttggctggaatgatttcttgtagggatagtaaacataacagtgttattaaaaaattccagcctgggcagcatagtgagaccctgtgtctacaaaaaattttttaaaaattagccaggcatggtggtgtgcacctgtagtcctagctacttgggaggctgaggcagggggattgcttgagcccaggagttcaaagctgtagtgagctataatcataccactgcactccaggtttagcaacagagcatgaccctgtctctaaattacaaacagacaaacgatctgtaatctttagctgtcctgaaaccaaaaagtaaatagaaaggggtggaaaagggggtgggcaacaccagggttaaaaattccttttttcttgggaacaccttaaaaactagccaggttttaggtgtcttggcagattcagtggcagtgtgaggaagataaacctggtccttctcaataaaatagcccgaattcctttctgtttgcattctggttcttttaagattctgcttgggtattacattcaggatacccatgtttccaatctcctttcttataccccattattgggacagaaagtccaacagttctgcttcaaccgtgatgcagctcgtccacagtaggagtagcctaattaacatatactttctgtgtgctttttctgtggtcagttgatgaacaaagatagttgacccattactgttgactaaattgatgagggatatttttatgataaaagacacctccacacccaaaacaaacaaacagtaaaaaaaactctcaagtcagagaaagctgccaagttcataggatagatttgatttgaatagcagtttaattaaccagactgcaaacttgcttttcatacaagtgccttgttttcttcccagtgaggagacagctgtccatgtcatttttcattcaacatgtattggagtgccttctatgtgccaagtatggatccagacacggggggagcagcagtgaacaaggcaggcaaagacaattaaatgagcaagatactttcagagcaggacaatatggacatagtaaaatggagtgatgttctagagtaggatctcacaggtagtgtggttcaggaaggcctctaaggaaatgacatttgcggtaatcatgcgaagcgggagcagctattaagaaaaacttaaggcagagatcatcttggccttctaagagaaacagaatgaaggctggtgtggttagaatatagtgcacaaagggaaaagtgatatccagatgaggtccgagaggtggacatgcagcagtcacatacaccctgtaagtcttggaagttaggatttttttctcatgggatgtcattgaagagttttaaccaggggaatgatatattccaatatattccaacatacatttttaaaacatccctctttaaaaatggcttagtgtagagggatggattgtaaaggccaagggaggggcggggacatgagtttggaggatattgctgtgatgcaggctagaggtgacattgcctaggactcagaagcaatgggaagatactaatagcttccatttattgagtgcttccttcgtgggaggatccccacctctccagtgtaaaactgataggatttataggcgttgagtgggagctggtagtaagtgaaaagagaaatcaaagacgatttctaggtttttgatgtaaggaatgactgatggtgccctttactgaagtgaagattggggaaaagatttggtggaggaaatcacgagttttgttttggccaggccgagtgtgaggtggctagtgaatattccaaggagtgatgccaaataggcaggtggataaaatagtctgaagctcagtagagacttgatttctggagacataaatttgagagttacccacatgatatttacttattgttgtgggccccaagaccactcccaggtttggtgattccctagaatgactcacagggctcatcatgtagtcatagtcatggcagtgattcattacagctaaaggatccaaagcagcagcagcagcagagggtgatgtgcatgcagtacccgcagcagactggagcgctctgggtataagcttccgagtcctctctcagtgttattccacaaacacgcttaattcctctagcactgagttgtgatgtgtatgatgtgtaacctaccaggaaagctcattaaagactctgtgcccagagtttttattggattggtcatgtagacaccctctgccaaaattctaagctcccagaaataaatcaggtgttcatttttttttttttttttttgagacggagtctcactctgtcgcccaggctggagtgcagtggcttggtcttggctcactgcaagctccgcctctcgggttcatgccattctcctgcctcagcctcccaagtagctgggactacaggcgcccgccatgatgcccggctaattttttgtattttttagtagagacggagtttcaccatgttagccaggatggtcttgatctcctgaccttgtgatctgcccgccttggcctctcaaagtgctgggattacaggcgtcagccaccgcgccaggctcaggtgttcattaagaaccgtattgcttgcacaaacaatttaggcccagtaaaccacccttaccagttaggaaatggtagggacactcggaaatcccaagttcccagaccacttccctaagggtagcagtctggccttctgtgttaactcctttctgaaccagctttacatgaggtactgttggaagtgtagggaatacttagaattcctgcccttagtaggcctaccataggcctgctgtgcatgagataagacagagttgtacaaattactgtggttgtactgaaaaagtgccatagaactgtagaggaagaaaaggcccccaaggctggctttgcagggactcaggtgtccagctgacacgtcaagcagccaattctgtttgtgtgtatcatatacatttttcactcttaaaggtcagttttgctatctgtattgaaaaataaagtgattgaatttgttattaatcagaattaaaatatgaagtgttcaacgtaatattaagttgtgtatgtaattatttgccatcttccactttattcatagattgttggcaaagattgttcagtctttttttccacttaaagatttctcagtttagattggagttagtacaacctgaaaatatttctctttctgttataaaacggctttattactttggttgtatctaattccagatgccaaagtgacttccatttcgctggagctacttccttcaaaacctaatcagtagaaagatttcttgaatattttatgtataactttgaaacttatctagcaaaactttgatttaccacaatgttcaaggaaatatctgtcctggttagttatattcactaattaaactagaaccccccttttggcctttagtagtaaaagccttttgaaaatgttttgtggttataacaggtttgagcatcattttccactgtgcctgaaactgtacacaaaaccagtcttagcctgaatggagtcccaagtatctccaggaatggtgggtggtgggtgtgtgttgtgatacccacctacttttaaactaagtccttgataagaatttattctcgagactggtttctctttcttttaagcgaacagagaatctgcagcaaacagattttatgctaaaagtaccagctagttcattaactaagttctgattagttgcaatttggttttactaattataatgactttatttttctaagctatacatttgctcacattagggacctcccattgcctgcaggccacgtgctttaatatggcattcagggctcgctgtaattgaattccaccctccttccagattcttctgcagtttccgcacattcccccatatacttcagctacttgaattactcctttccctttgccttgttcaattttggctattccatttgaaggagaagagatagcatgaacaaaggcacatgcacatgagagaacaaattctgagtagcaaatacatacgggtgggtgttgctggaatgcaaagttccaggtagggtagggaaaggagactaaaaacaggtctgagggattgctgagtcgagccctagaggtcaggacccaggccttcttattctttgtaaaccttcattggtcgagctgaggagtgcttagttgatttctgccatgaccttgatacagtaagatgattgttgaaagttaagtaactgtattacttaccgaaacccatatacatttttctggaaaagattacaatttgacagatattcattgtgcttgttcaagggcatatagcaatgggagaaaatgacaaatctgcacccctgtggaaattacattcaaatggaaagcgtgtaaacaaaaagtaaactattgaatatacagcataccagaaaagttgtatggagaaaaattgagtaggggcagggagtgttattttcaacgtggagattagggaatgacacactgaaggtggtgtaactaaacatacccctgaaggaggagaggaattgagctgtgtggccacatggggaatgtggttccaggcaaagcaaacttttgaagtgctaaggctctgaggcagtgctagggtagctgttgttgaggcaggaggttggaggacgggggtggggaagagtgggtaggagatgaggccagggaaataacagctgggttgggaaaggccttggagtctttataaggacttttattctgagggatactgggaagaaatgttggcaattttgaacaaaggagtgacgtggtctgccttagtacagcagctaaaattgtattttgaaaactcgagaacaggttgtaggaggacaagggtggaagcgaggagaccagtaatgaggctactgtagtaatgcaggcgagagatgatagtgccttgggccagattgatagcagaggaaaagatgagaaataactcatttccggatatattttgaaggtggagtaaaagtgttttatcacaaataccaagtaattgggtcatatttttaagctttataaaattagcagtagaaatgtttttccttttttttcccgaaccctcacttctgactttaaaaagtttaacaaaaaaagaattaatttttatgtactctgattgagtcctttagtcagtgaaatttaccactaataattcataagtgagacattctgactgggctaggctgaaacctaagttctccttgagtttatgaaagcgttgtcatggtcgggtgtgaatagagttcccatctcagttgaattggcatggtttctccttgaagttcctattaaaagccatttaacttagatactaagatgtcgaggtatcccttcttgtttaaagtcattcagtataagatcgttgccatttaaaccccctcacaaaacagaagatttcatggtaacagtgcatggtgactgaattcactttgctttcagaaagtctaacccaatcttctgcttgctgtctgagattttattgtaggcaattggttctcagtgagtgctagttatagtcctttatatcctgtttcaggagttaacatgtcaggggaaaacattttctaacttctaattcatatcctttgatataaattatgaaggactgcattattaagtgtgttctaagattatcagatacctttgtgtgaacctggactatggacttagcccagaattaaaataattatgcagtggttagaactggaatgattcttgacatatacatgtatgtgattgtgtttatacatgtagaggtgttggtgtgttagaattgatgagttgcagtgaatttatttcctgttttaaacatctggttttttaaaatcatttttctatctttaagagttctgatccacttttaatttccagcagaatgtctggcattttaattaacgtcttcttaaaaagcaagctatcacaactgataagatggagttttgataattttctgtctgtaaaaattggccattgacttttggtcctatttgatttcaattatggcatgatccctcccactgcacgaagaatgtagtttgtggtcaagttttgggtatccaggtattacaatatgtaccttatttggttttaaatgtgtaaatcatttagtcagttgttgatttcttttttttttaagtaggtctgtcctaattaaaagcaaaaaatcttaagcttatatatatcttttcatcttttctgggcagagaggcagatgaaggctgtaaaaaacctttagaaagattgctgaacatctggcaagaacgaagtgtgtatggcggcgagttcatacagcagctgaagctgtctatggaggactccaagagccctccccccaaaggtagaaacatcaccacatgtttacagctcttggtctttgcctactttcgaatcaaatatgaaaagctgcagtggggtttgctgtgaaccaccagcgattttatgattcttcagagagacagatgatcatgaatgatggtgagaatttatgtagtgctcacagcgtgtaagcctggttctagtattcatgctattcatcctctcacaccctgacttttgctctctgttctccttggcttgcttctgtctttcagagactttccttgcacaaggaaaggaacaacaaagttgttcagagttgtggtgaactaggaagtagcctggactaagattttgtccttgctctgccattaactacaataggaccttggataagtttcttagctttttaagaacttgatttaattaaatgtagatgtgcttttgaaacatatccttaggattgtcagcatggtgtctgtctaaagttgattgtttgtttgttttggagacagagtctcaccctgtcatccaggctggagtgcagtggcgtgatctcggctcactgcaacctccgcctcctgggttcgagccattctcctgccccagcctcctgagtagctgagattcaggcacctgccacaacacccggctaatttttgtatttttagaagagacggggtttcaccatgtttgccaggctggtctcaaactcctgacctcaagtgatctgcccgcctcggcctcccaaagtgctggattacaggtgtgagtcactgcgcccagcttaaaactgattttgatctttactgaacccaggatatctttaggaagtgcatctgtgtgtgaattttgcaaagcccttaataagagcttatattattttttcttttttctttctttttttctttttttttttttttttttttgagacagagtcttgctttgttacctgggctggagtgcggtggtatgatctcagctcactgcaacctccgcctcccgggttcaagcagttctttgcctcagcctcccgagtagctggaattacaggcacctgccaccatgcccagctaatttttgtatttttggtagagacagggtttcaccatcttggccaggctggtcttgaactcctgacctcgtgatccacccgcctcagcctcccaaagtgctgatattataggcgtgagccacctcacctggcctatttttttctttaaagagtaagatcaaatgttgtttagttacttggcttctggttagttgtggtttaattctagttggcatgacatgtttcttagctacagatctgatctgcctgcatacatgtttcctggaggatcgagtccaagtactgatagtattgaagaccctttctatctgaactagcctgtttttccagattcttctcctgccacttcctcacttacactgtattctttggccaaactgaattgccgacagtttaccctctggatgctctgttggcactgcttcctttccatctgctgttacctctacttgatgtccttctaccgctttcactgtgtgatgaactcattctccaagaatgcaactctcattctgacatcttccctggcttgtctgggcccatgtggtcattccctccttgttctctggtactttatacatgcatctgctatagaacctagtcatgattagcatgtgtgacagtatccttcactgagtaacccttttgtgtacccttcatgatcctttccaggtctggaattatttgcattttgcagtgggtaactttcctgtgaaaccaaaggttagaggctttctgtgaatgacataagtgctttcagactgcaggtcattgttgttttacttggtgttgctagaagataattttaggatcactcaggtgattggtagcttctgaaaagcaagatgtttcctgctttggattctggtgtttttattgtgtcctttggaggtcttcagtacagctttggggaattactcagcattctttactctgccttagagttcattggtaaacagtgctggtttttaagaacacctttgggcaagtaggagagccttgaaagaggatgtttgaagctaatgttgaatttcaatttaatgtacatttgctggacacatactttgaataaacagatatgctagatgctataggaaagagggagaaaagagtgaggaataggtttgcactctgggaatgtgtggaatttgtggcagtgatagtattgggaatagcttcagtgggtttctgatttttttttgaaagtctagacagacattaacaataatagaggcagtttcctctaggtagaggataatgctaatctaaagataatttctctttctctattctataaagatgaaaacacacatcaaaagatttcaacatgtgtgttagtcccagctgactcactctgtcttcactctctggacctgagttatcagaatattttaccacagtcctttcaaatgttgatgagttctcgagaagtttatttccaaatttgagtagtccttttatattccagctttgattcatgggtaattctttgtcttcaggcaacttcatggagtttacctctgaaataaaaatttttctatggaactttgacagttcttacaacattagagaatgcatgagcttaggaattctgttttagaactgggtattaagtttataaacctgtctctcaaggtgttctaaaggtgtctctcaaaacatcacactgtaccctataaatatatacaattattatttgtcacttaaaaacaaaatttaaaaagtaagaaaaggagaaaagttctctactcttgagaatactcaaggtgttgcttgactgaatggaacttttttatttgagccacatgtgactcatgtagtatacggttgtagaaggatttagagagagagggtagatacaaagggactagcatttattgagcatccgttatgtaccagcctctgctggctgcttttcatattaatttgttttagatccttacaactactctgtgaatttggtattattttcatactttagatgaggatactggctcaaaaaggtatagtaattttgttcagagagagataattggtaagtggcgaattcccaggtctatacgactttaaagctgatattcttcacactgtcgtatttcctgaaagcacacggtttcaatattggtaggaattttggtaggaatttgtgagtaggttacccagctttcctggatcttaatatagtttagctattcaggcttccacagtatgaatcctagctgtcatttcttttttgagatgaagtcttgctctgtcgcccaggctggagtgcaatggcgggacctcggctcaccgcaacctctgcctcccaggttcaagtgattctcctgcctcagccttccaagtagctgggattacaggcatgtgccaccacgcctggctaattttgtatttttagtagagatggggtttctccatgttggtcaggctggtcccgaactcccaacctcaggtgatccgcccacctcggcctcccaaaatggcaggattacaggcatgagccaccacacccggcccctagctgtcatttctaaagctctgtgaccttggccatggcatttgatccttctgaagctcagatcctcactgtacaatatggctattaatggtaataccttctaggatagtgatgaggattacttgagataatgcaggtaagatattatcagtggggcaatgatacgagttttgtttgcccctgccagttctagtatctaatgtgctgagtttctatatatgaactggtcgcaaaagtaagaagaggtttttaatattttcagtcccccagtttttgtgcgaggctggagaacatggtagctaagagtatgagttctaggcacaacttccctgggtttatgcctggatttggctactcagttcagtgagatgataagggtagacagcttgtagaactgtgcctcaaatgttagacctttatctgttgtaggttcttttctctccacaagtaaagtttaatgtgccttattaaaatgtcctttattatgcagggatggagcaaagaatgagggagctgttgcaaacaatatttcctgatccttttctcattataaaagtaatataaagtctataggtgtggttttttttgttgttgttaactagtcaattgaagcagtgggagtagagaaggaacaaaaaaacctgtaactgattgcgatcaattagttgtaaacactgctgcactcggaccaaacgcggtgttttttttttttttttttttttttttttaaatcacagaaaatttcaagtggatcctctagaagatccagctttacggtagatggctgcatattataatgtgatttgggaacctgcaggccagctttttgccttaagattagtttcacagtctgccattgtgtctgaaattctcccacaatcaggttgtaagaggcataccataaacccttaggtaacgaggattacttaaggttagctgagtacaaggcctgctggagacacagggacaagttggaggatagaatagaaggtgcccagtatgaggacagaaggactttggctacccccacagtttgtcctgcctgtaaacagagtggttgagtgagtgaaaaagggagagtaaatatataccgtggtagaagctgaattgatagtggaaggcttaccttaaattcagatgtagaaatggaactgacacatattctagtttttaaaataattttaatttttaaaaaaatgtatagcttttgaaaaggaaacctggaaatcctaagttatttttaatggctgtctgactagactgacaataccaggcactataactgctgacttcgtagcagtgatagtcatttctggcctagcactagcattttccaagctctgtgactcctcccttcaagcggtttcaaactccgacctgtcacccctttcctaggtactgcagggatgtagaggaataagacacaaagtgctcctgtcggagaagaacgcttgccagtggccagagtagcaaggccaggtgctttaagagaggcccgagtgccgtgggagttggaggccatttgtcatcattaggctttgaacttaggaggaatctgtaaaatcattagaagccccttaaggtttatgaatagggacatgatggagtgagcactccgctttaggaagattaatttaataacagaatacagtcttccatatttacaggttccacatctgtggatgcaaccagctacatattgaatatattttgggtaaaaataatacatattttaaaaatgaaatggtgtgacaattatttacatatcatgtgtacattgtattaggtactataatctagacacaaagtatacggaaggatgtgtgcgtaagttatatataaataccatgccattttgtaagggatcttgagtatccctagattttgatatccgtagcggtcctggaaccaatcccccatggatactgagggacaactgtatagtctaacttgggaaaggagcaactagaggcggggagacagtggtctcaaccagctgtgacaaagggcagattgctgataagaggctgtgtaggtgaaggagcaaagggagggagtatgtaaggcatcagtctgaggtatggaatctgctagaaactgggaccttgggatagattctaatggtttccaaggccttgtacctggaagacaggtcagtgaaagtgttcgtaatggaaataggtagctcagggaatgaggagccctgtgggggaaatgattagtaattcatgtccagaaatcttatgtttgtagcaccagtaggtcctccaaatggaaataggaggaaactggaaaaatagggtaatggttaacacctattgtgccctctgccagcaggatggcaaaggacataagttgtcctaaaatgatttcttattttaagtcttgtaatgctgttcgtgagcaacagtgtgaagtggtaaagataactccagataatgaggctttgatctgtagcacccagatttacactaacaaactctctgactttgggcagactgcaacctgtggacttagatattttcatgaaaatttgagttgggggaaacaaaggcatgggtctgtctaagtcctcccagtgccaaaattcaggaattctaagtgtcgaggtagtgtttgatgtttatatataataatttctgtgtgagagtttgaaaacggaaggatttcaagttttgtaatttttttctaccttctttagcatatctaatagttacttactgagtgctcttctaggtgcttgaaagcaaacagaacagtataaaaaattttgaagtttgtacttaccttctaatggccactccttccacatgaccactttgatgccacagtggctaagtgtctgcatgggtcatatagcacacattaattaggcagctactatgtacaaagtactgttaggtgtttcttatgtaaattttatcctaatagatttttcatattaaaaatatagcaatctttgctttgcatagtagtgcaggactataaccatgattgtgcaagctgaacccatgcaaagcaatctttataatcagtggggaaaattatgattgttctgtgacttttaaaattttttttgtcaaagaattaaaaactcattgttgattccaaatgtgtacggaaacaaaagagataataaactaatagttatttaatatgctgtaacaacaaattagaaacattgagaattaaagtgtgttttctttgtaacaaacttatcaagagtagtttgaacaagggttgccttcttctggtataatttagatacatatcagagcaaacatcttttctgtggctttgcaagttgtcatactgtattttgtttggatcagcttccaacattttatcttttatgctttcagtattgtaaaatacctctcagtttctttagcatgcagttttttttttttgttagcgtctcttcctctaggacgttgtcattcttttcatcactcccactttcttcattgctaagttggcctctacacattcctctggccatggatctaggctccctctgatgctggcagtggcagcatcctgcagcgtgctctttcttctgtaactccactaatatgccattgggatttcagttccggcattagcttttgtttcagtttctttgttccacatttgtctttatgatcaataccctcttctgatcgttcatttttataaaatgtcgtgggtgttatcactgggcgataaggagacagcacagcgaagcactttgctgtctttgtgtgacctgcataacaggtgttcagtgaccaatcactgattgacttcaagaatgatgtgattggtccctgatcatgatttgggggctgaagttagcagcaaaatttgtactttatgcaactactcaagagttaatatgccatggtaactgaagtttgaacttgttttattgagggactggtgtcatttaacgaagccatggtaacaaatctgtgtataatagtatgcgcaaagtgaggacggcctgtattgcagatgttcctgtctcctttttttgtaatagacagaatcattaagaagaagtgaaacttggccaggcgtgatggctcacacctgtaatcccaggactttgggagaccaaggcgggtgggtcactggaggccaggagttcgagaccagcctggccaacatggtgaatgaaaccctgactctactaaaaatacaaaaattagccaggcatgggggcaaatgcctgtaatcccagctactcaggaggctgaggtgggagaattgctggaacccaggaggcggaagttgcagtgagctgagaatgtgtcactgcactccagcctgggcaagagagcaaaaactccatctaaaaaaaaaaaataaaaataaaactcatgatattgacctggctttcacttcaaacgtgagtttggtcagttagtatatgatgtatataatgtagagaacaggagctacgtgacttgtttccagaagaaaatgtgtaagcaaaaaatgtgtatgtatctgcagcaggtgcctggtgtccccttttttctaaatgagagggtacctgtgtggtgctaagtaatttgagtgcagtggaaagaggacaggttttggagtcataccgtaagtgtgtcatttaacctccctggcctttgttttctcacctttcagctggagatgctgtatcttaaaattgttggaaagattaaaaggaaactattgcaatgccaggcacaggctgtgtccaatatttctttactttcgaaactagaatttatcatttagatttatttcccacaattgtttggcatttattttgtattgtctaatttgatgcaaaaagaatgattttggaattaacacatctatcataacaatgtaaaaacatacggtgcagatagatcataaataatgtaacctgtcagcctcaaaagtggttaaatttaaaatggtaacttaagtaatttttctcagtagtatcaatcacatgtctcagtaatggttattttaattttaaggtaaaattagatttattttatttttaggggaatagtgtaaagaatatttgtgtttgacacaattttattgataaaattttctctcctgttttctgaaatgatccctggaaagcataacgtatctcattttatacacaatatcttctctgtaaaccctagcacacgttggtttgcttcattgtattgtcccatgagtttcttactcaagtgtgatagttgggtaagttttcgctttagatgcctgttttctgtagtattttaccagagaatcaatctgagatgacggacaaagacctgtttgactcttttcagtaatgtagggaactacagtcaatttaaaataactagcataaaggttactattaagccattctgaaaatgtgtgccccttctgccctgtttttacatgtggcccattgtgcatagcatgtgacttatcactacaggatatgtgactcaaatttattactttctcttttgtctagcaacagaagagaagaaatctctgaaacgaacttttcagcaaattcaggaggaggaggatgacgactaccctggcagctactctcctcaggatccttctgcaggacccctcttggtaggtcttgacccccagagagtagggaacagtggcttaaagtgacctctagttgaagactatggccacaaggtggcgccagtgaccactggtatggaatcatcagagggcacctctcaggggccccgtgcatcatcctgcccaaaggagcttgccggatggcaggtgtcagtatgtctttgcgtgccataactctgggatgggcttatgttttataaagtacttggacttggttttttcaatcctagaaattaagaatattctttaaaaatagattttggagaaagggatagataatattacaaagatattcaaaagtcgtctaccatggcctgtctccagtagcatggtagttttataaagtaactcattaatatctaaagacagtctatgtgtcaatagcaaatttgctgcactgtagcctattaaatattgaaacaaggagttagtctttacccatgtgtttgtgttatttggctatacaggttagcttacaaaatctaaatgaaagaagttgggcacaaggtgacagtttaagtaacttgaccagtgtcttaatttaaatccaggtgtgtctgacttcagagcccatgctcttttcaaggcgggggcggggggggcttcatcttattttgcctaaaacagctttattacacatggtcatgcttaaagcctatgtaaataggaaacatgtctagtttgtgttatgttacggtgttgagttagactagggattaaatgacagcagtgttaggtcatatatctttggatttaaacactttaaagactacagcctagattattacctttcagggtaatctaactaccatctacagagctagctactccttggtgattatggagtggcctgttagcattgttttctgacaatttaagaaactcctttttgatatatacagaaaatgtatccctggtttacttttcttgttttttccccctgggtttataataagtttgatacatttaattttgggagtgacatccattttgtcaagaaaacccaagaaagaattgaagtaggttgatcagtcaacatataattttttccttctccttcttgagacaggatcttgctctgttacccaggctggcgtgcagtagcatgatcatagttcactgcaaactcaacctctggggctcaagtgatactcctacctcagcctcccaagtagctgggactatagacatatgccaccatgcttggcttattattttattttaatttttttgtagagacagggtgtcgctatattgtccaggctggtctcgaactcctgggctcaagtgatcctcctgccttggcttcccaaagtgctaggattacaggtgcgagccaccacacctggccacaacacacagttgttaacatctgatatttatacctttattctatactggaaatgatacatcatttgaaattaagcaacatgaaccaaactccattgttttgaattgccaaaaacatgttcttttagaattaaaaaataataataattattcagaatttcattcatgttctgccatggacttagataaactaattttgtggattttcttagagtccgtgacattgacttacatgtaagctctggggctaagaacagttttttttaagaaatggcaggaatgactgtttttagaatttgcctccacctcatttaactccaactaattttctttaaaccccatgtcttaatgggtagtgttgtttgtgttttcatcttacagactgaggaactaatcaaagctttgcaggatctggaaaatgccgcatcaggggatgctactgtccgacagaaaattgcttctctgccccaggaagtgcaagatgtttctctattggaaaaaataacaggtgagaaggtagagtttgggtgaaaggtgaggagagagggacataactgtaatgcagtaaccctaggccatacttaacgtctgcaggtatagactactttccatgttgtattggttgctctaccatcttgggatttgcaaacataactcacatggtgaacaaagaaacttttgaaatagtcaaagcttgaatagtgattctaggaattattgcagaaatgctggtgtgccacaacctgtggctctctaaataaggtctgttaaaaacatagtacaaattgtgtgcgtgtggggtgggtgggggagattaggtattattctgtctgttagactcataaccctcttactaaaagaaaaaaaattatgattcagggctgtgtgatttgtgccctgctctctgacaagccccgtagatgatagtgcgttcagtgccaggaatttcaggtgtctgttagacatgtcattttgccctagtcgtgacctccctagttaaacagggaggggcagttgacacgattcctgctttccttatgggaaattgaaaggaaggaatgaagcatgaactaatattgacagtaggctttgcaccggtacttctgttctttgtgatagtctttggaggtgactaaatgtgtgtctccatattgcataggaggacattgaggctttgagaagataggtgtcttgtccaaggtcacacaagtagtggatcttgggattctaatctaggctgcaaagcctatgttcctccccttacaaaagctcagacctttcattccattgtcttccaaaggccaccattttcccactccagtcccttgacttggctgcttctctaacttcttccatatctatctaaaggaaatcaaggtcactgatgaaatatttccctcaacaaatatttgaggcccacctatatcccctcaagtgaagtgtcaagaaggaaaataaagcagggcagtgggagcggaaaatgattgcaggcggtattaatggtattttaaaggtgtttggggaaagcctttctgatgagatgaccttgagcagagacccgaaaaattaggaagcaagccatgaggatatccaagggaaggaagggccaccaggcagtggaagcagcacagggaaagacctcaggcagtgggcgtactgggttggagaacacagctcggaggccttgtgagtcacgcaagaagcatctcagcccctcactctgctttcccaccccaggaattcaccccactgggacctgcagtctcttgattcctcccccacctcttcctagtcctcgagtcctcattttcttctttattcagattggagtctctcttttcacttcctcacacacaccttcaacccattttcttctctttctcccttcagtgtagtctcctggcaaaatccctaaacaggttaaatcacattttaaaaatacttactactaaaaggaccacttcatttattcttactgtcaaaatcataatctgcaaaaattgcaagcaagttaatgtaaagctagccatgtatgtaattttgtttctctgtttcactgacctaaaggtctcatgtagcttccttttaaaatacttttttaattttgatttttaattgtggtaaaatacatataaaatggtaagctacataaaacacaaaggtgtacaatttagttgtgctaagtattctcatgttgttatacaaccagtttccagagttcttttcgtcttgccaaactgaaactctatacccgttaaacaataactcatcatttttcacttcccatatcacctggcaaccaccattcttaaatttagctttttgtctgttcctttcccgaacctgtgtagtggaatgtggctgggaaaaactaacatgtctgagttgacttttcctcctatttctctacatggacatgctattttctaaacccgcctctctgtgtattagatctgctccttctcatctagccaaggccattgctccaacaatgctccctctttctcctgcattctccattttttactctttactggatcattctcaatagcataaaaacatgaatttttcccccacttgggaagatttttttcttgacctcatatcttcctctagctactgcctcatttctctgttctttttagccaaaccacctgaatggattgcctgtgctgtctctctacttcccgtcctcccagttgctgatgacttccttgttgctgaactcaatggtggattctctgcccccatcttaacttcaccccagtagtatttggcccagtagattatttcttcttcctgaaaatactttcttcacttggtgtagtagttggaataatgcctcctgaccccccaccccgcaaacacccatgttttaatccacagaacctgtgtatatgtaatcttatatggccaagggacttggcaggtgtgattaaatatcttgagatgaggagattaccctggattatttaagagggcccagtgtaatcacagggtccttgtaagaggaaggtgggagagggggaatgagaaggaggtattaccgtggaagcagaggttggagcgatgtgctttgaagatggaggaagcaactgtgataaggcataagataattaattggtgatattccaagccactaaatttgtggtaatttgctacagtagcagtgggaactaggaccctgcattattctagctttcctcctctctttctgtgtcttttcagcctccttgctggtttcttcactcctccttgacctcttcatattagcccccttctttagctggtttcactggcagccattctcacccaatttcatgactataaataagagtttttctgcgaatgatttcctaatttacatctctagtgttgacccttccaccttgaacttgagacccatatatccaacctcctactcagttttattagttggatatcttgataggcatttcaagcttactctgccccacactgaacttctgacctttcctctaaaacttgtttcactcatggtcttctccatctcagtaaatggccctcatcattcctgttgattgggaccaaaaccagcatctgatatcctgtcaccgcctctaccactgccacctggtacaggtctctaccatgttcagttgatttattgcagtagcctcccagctggtctagctacttcgtttgttcctcttgctcagccatcattctagtctcaacatagtaaccagagtgatcctcttagtagaaggcagatcatgtctcccgctccacataacacccccacgactccccccatcaccaaattaaaagccagagcccccccccctttttttttttttttgagatacagtctcattctgtcacccaggctggagtcagtggcatgatcttagctcattgtaacctcaaactcctggactcaagcaatcctcccatcctggcctcccaaaacactgggattacagatgtgagccccctgcctggctttaaagcagagtctttcactggcctctgttaccgcaagacttttactattttcccctcactcactgctcaagtcatatgggctccttgccagtcactctttcctcctagcgcctttgtacttgctgtcccctctgcctgaaacgttcctcccagatagttacatagctggttctcattttcttaggcctttgtttacgtatcaccttagcgaagctcaccctgaccacctttttgaaaatgttgatcccccccaccttccagtgccccactttttctcctctgccttgtttttctctgtagttctcttcagctgataagtaagcataatatttattgtatattgattctcttcctacctgataatataaacttgagggcagagagtttttgtcctttttattctctgctgtttctaagagcctagttataagaactcaaatttgttaaactaattggaaggttttgagcagaggattggtgggcataaagcccgattggggtgggctcaggaggagagcaggtggctacacttctctgaaaagagtttagctgcaagggggagcagggaagcaggtcagtagtgggagagtggtatgtaggtggaatacatggcagcaggtttgtgtgctagtggttttcttaggagggagagagagaatttgctgaggtagagaagacatgggacggctgcagaagtttagtctttgaggaaacgagggaatgggatgcgcatgccgcttggaggactggccgaaagaggcacttgccactcctctgatgggtgaaggagagcagggagcgtgaggacagcgtgggtaggtcccccgaagcgagcatctggcttctgcattttcactgcgtatttgtataactcactaaactattataagttacttttctgggttgtaattatttgtgtaaatgaattatttcctttgtaaaagttcttgaggctgcaaattgattttctttttaatcttaaaaattagtatttgccattttttgccacaggcacctaaacatcttagtgaattaaccattttttaaaaacgatcagtcaagcaataacaaaactaaaaccaacctaaccaccccaggagcttgctcatggactgagccactgagcaggaaggagaagttggcggtcctttatcctctgtgactgaggtgatctctttcctttgtgttccattccgctcacttcttccccttcaccaaggacattctttgtttcccatccctgaggagggtagaggttcctaatctttggcatcacacccaatctggaatccttcagcagttcctcttgcaatattcacattaagaaggcatcgaaaagccagatggctgtttgccagagatactgtgttggggattcttaaatcctagttccccaggagaatgcgagctctcacctctgacagcctgtatccatagggaatgtcatggaactgtcccacggtactgccggagtctctggtgccctttgtttcaaagcaccaacctactcttttgattcattcaggtcttttaaaaatgagttatacatatttaaaattcgaatctcaccaccacccacacataattaattatatcagttctttgtaaatacagatcctgctttttcttctcatttcttaattatgagcctttgttcatcacttcttcccaaaaataccctttcttaatgtttttccacccccaaagcatgagttacaacccattaattggatatgaaatcagtctggtagctaatgaccaacagtttttgaaaaatggaataaagccatcctggctaacacagtgaaacctcgtctctactaaaaatacaaaaaaattagacgggcgtggtggcgggggcctgtactcccagctactcgggaggctgaggcaggagaatggcatgaacctgggaggcggagcttgcagtgagccgagatcatgccactgcactccagcctgggtcacagagcaagacaccatctcaaaaaaaaaaaaaagagataaaatagaagatagagcacacatagtaagaatgggtattttatgaaacgctgctttcatttttctgtgtatttacataagtgtatttctgctgtgggtcatgttcagaaacatttaaaaacctctttcttatcagactttacattttgtcaaatgtaggaagaagttcatccccacgtccaaggcttacatagtttaagagatagagtgctatagatcattttagagatctggcttcgagccccagcatctcagctcactgcatatagaaacctgtcatgtagttttttttctggcggggagggggtcttagttcccacacccaataaataagtgcatgctattttttattccagtggaaagtaaaaagactacttaatgaaatatagtggtccctccatatccatgggggtttggttccaagaccttctgaggataccaaaatccaaggttgctcaaggcccttaaatggtgtcggatttgtctataaccaacaaacatcttcccatatactttaaatactctctagattacttatcatagctaatgcaatgtaaatgctatgtaaatagttgttattctgtatttttaaaattgggtttttaattgttatttttattggtttgtggggttttttggtctgagtattttccattcatggttggttgaatccacagatacagaacccacagatataggggccaaccgtaatataaatgaaagcacttgcaattctcagagacaaggaacgattttttcacaggtgatcttcaatatctctttatgcttgttttgtcaggagagcttttgcaggaacaggcatttagaaagcctttgccagattccccccatgtacagcttcctcacttcaggtaattgagtagtgtcctgtcttgttgacagagtgaatgcctttggatttcttgcttaatcaactcattgtttgtccacaggtgctggcttattctcagactctgtatattgggagagaaaccgttaacctcccccagaaatgtttgtagtcatacctgtgtgatttgtatattttctctattttttggtctcatttgtacttagacaaagaggcagctgaacgtctttcaaaaacagtagatgaagcatgtctgttactagcagaatataacgggcgcctggcagcagaactggaggaccgtcgccagctggctcggatgttggtggagtatacccagaatcagaaagatgttttgtcggagaaggagaaaaaactagaggtgagtgcattgaaggcagacccagactgcccacgtttcccttcctgtagcccacattaggaggtttttattatgctttaattaacaacatttttatcgtttaaaaattcatgatgtgaattctgaacatccatcagatactgtaattatttgagcccagttaaaaattgaagtcatgttcttatatgtccaggacagaacaaactggattgtaggaaacaaacagtgaactcttaatcacagccttaggatcttaatattgctttcgtttgaactcatgtttttaaaaaaattacgaattgaggtacaaaaaggatagcaaatcagtgaaaaccaaagaatatgtttggtagtatttgggaagtgctgaaaaatgtttctttcaagtcatttggaggtttatttctttttttttttgagacgcagtctcgctccgtcgcccaggctggagtgcagcggtgcgatctcggctcactgcaagctctgcctcccaggttcacgccattctcctgcctcagcctcccaagtagctggaactacaggcgtccaccaccacgcctggctaattttttgtatttttagtagggacggggtttcaccatgttagccaggatagtcttgatctcctgacctcatgatctgcccacctcagcctcccaaagtgctgggattacaggtgtgagccaccgcgcccagccgtttggaggtttatttctgactttatccatgctgcggccaagaagttgtctgcctccaagatctatctgtaattagctcttaaatgtcacagtagtatttatatagcacagttctcaaactgtaaaagacctcatttctaccctgggttgaggacattagtctgagtgaccttggggagggagttcagaaacatttcctcaccatacacttgtttggcttcgtaattaagtacatggtagtttaccctcagtacttgctcccgtgggataacagagccagcagtgtggatttttgggaactttgctgccccgggctgctgcacttccttttcaggaatgtctgctcttctttttttaagagatatggaaaagagttgcagccagtggttttgtgaaggaggacacttctgagttagagagccagtcatgttgtatttcaagaaatacttcttaaatcccactcagagtagacaagggacagggagagccatgtcacctccatgctcaggaaacgtgctctggcacagaaggagggaacattgagctatctctgaggctgagatcattgtatttgcctttcagcatggtcatctgacttgaggggaaatgagtggcaggcactttttaccgtatccttacctgcagtgattctgggaactgtgttgcgtagtggtagcaggaacttcacattcgtagcctgcttgaatgtggaagatgggaaagggctgtaaaaatcctacagcttagatttagacatcggcactgaccagagatcctaaagggagttttacaggcagtaccagacggtcatttatctgaaatgctcatctttcactgaggaagcattttcagcactgtgccccgggactaataagagagtgtaattaatgattctggttgtaagtcaccatgccatctgttgaactgccccttggcgacacattaagggctttctctgatctgtcagacattgattatcatgagcagctgttgttgggtagaacgtggcaagcaaccatagaggacagagtctttgaggagatcgggttggtagagctggttaactctttgttctgttttccctccccacagttgcactctgctctgtatattgttggggaatcattctggtttttgtagaactagtggtttgctggacgccacgagagggcattaaggtggagaaacagattagagctttggatgcgttctgtaactttccagtctgcgttgctctgcgcggttcattcagtggaatggggctggcattccattgctgaagaagcggaacagaaaggccccaccactggaaccaacgtacagagtctgaactgaaggttcttatctcaaaccatgtctccgaggcacatgagcagaaccatttattgtaaaaaatagagccgatttgctgcattaaagaaagcaaatgactagatacagtataaggtttttttctgagatggagtctcgctctgtcactcaggttggagtgcagtgacgtgatctcagctcactgcagcctccacctcccaggctcaaccaatcccccgtctcagcctcctgagtagctgggattatagattataggcatgtactaccacgcccggctaattttttttgtttttagcagagacagagtttcaccatattggccaggctggtcttgaactcctgacgtcaagtgatctggccgcttcacaatataagatttgagagatggttttagttcttttctttatccacgcttgctaaaaatttaggcagtctgctctcctgaacctaagatttttctctcacattctgtaatagactggtcctgtcccatcacatccctatggtggtggccgaacttgataaatgtatgccccttgaaagatgcgtgaatactgtgaattccttcagattgtccaaaagtctctctgcgtgatggggcagtacataaagtttacccacttttttaacattcatttttgtaacacagccagtccgttttaaaacttccaaatcagaatgctaattaaatattttattttttaatcctttcattgccttcaggatatacatagatgaaattctcagaactctttggagaagtagttatttgcttgcgagtctgttttcatcccaaagctctaatatacttaggttttgtgctttcctttttaactttgtatcttgctttatgtaataagcatctttttctctttcacttgggaattttatgtcggtggctcctgcatgtcaggatagggcgtgtgatgattcagagcctaggatgtaggagagggaattacggctcaaagtaggagattgtgtttcttccctcgaggaaatcatattctggtataaaaaacacaggtgaacataaaaccaaaccacttgatcgtacataatgtagattaaggaggcatttggcggttctgattgtggtttaaggtaagtccaaacttcctgtcaggcaataaaacctttttgtaaaaggaactagcagttgaagaagagaagcatgtttataaatggggagcagttagactggaccagacaggtatctgaagaaagacaaagtcagatgtgggaaggaggtgctgcagaccaccagtgggagattaaggtctgtgctctttaagaagctacgtattcattcagggagtcagcaaagcctgtgccagccagatgtacaaagatgggcacgatgcacttctcccctcaaagggcttatgctctagtcagggggaaatagcagcaaacaaggggttagggtagaattcaagataggttgtcagtaaggaaaatattctcacttgtgtctaccttgaaatagaccaagaaaaaaatgaagatgctaataataatttgatcagatgcttattaaaattgtgagagttatcaaatcatggacagtttctgaaactgtaatgccttcagcaggtctcccaaagtttgctagactgtatactctttgagtgctctcacagtgccaggaacatatttgttcctcagtaaatacttgttctgtgaaatccatcacttgatgtaacctttttctatagagaaaagggtttttttttaaggttgcattaaaagtggcttaacaaatctgatttaatgattggttgtaaagaatatgttagtacggaaaggtaaccatttttagaagtttctgtaggttttctcctttgtactacttttcttttttcctttaagtagaattatgctttattctgagataatcatctttttttgtttgtttgtttttgacttttgcttcagggtgtcatgattgactttggcctatgatgttggcccttaaacaccaggcaagggtggaaggaatgctgctgaaaatctgtgggtaatgtttttgtcatgaacatgagaaaacctagaaatggagaaggcacgtggaaggaagcacaaatggcagcccaaagaggaggttagagaatgtggagggtatagaagaaagcccattcagaaaggcaaaggccaaagataccagaaaagccttccagcttcacttccagagcaaagagaagctttgtttgtggttgacagaggtgactacattactcccagatgtctgctcaaagctcataagacatagcgtgagtgggttggatagggttcctgtcttgtcagcgtgaataaagcatgatacagacatgttctgttagcatgatcagtgcatgtggaagagtgtgtgtgtgagaaagaaacctatttgtacaagtattaaggaaagaaaaaaggtcaggaacctgcagttttcccttcttaactgtgatttttttttttttttttttgagacagactcttgctctgttgcccagggctagagtgcagtagagcaatctgagctcactgcctcccgggttcaagcgattctcgtgcctcagcctcccgagtagctgggactacaggcgcatgccaccacacccagctaatttttgtatttttagtagagatggggttttgccatgttgggcaggctggtctcgaactcctgatctcaggtgatccacctgccttggcctcccaaagtgttggaattacaggcatgcgcctccatgcctggccttaactgtgaattttattcagatcatggtgtctgactgtcagcgatctagaactgaaagcagatagtcctgtgttgacccacatgccacatggtgcacacacacaaagatgatatgccacacagggaagagctcttgagaaatttgttccaagctgcagatttattgttttagttgaggtgaaattcatataacgtaaattaaccatgcacttcaaagtgcacacattttggtggcatttagtacgttcacagtattgtatcaagttccaaaacataattgtgtctggcttctttcggcacgatgttttcaagattcatcccatgttgtagcatatatcagtacttcatctcttttatggtagaacactaatctgttgtatggatgtgacacagtttataacctgtctatggacatttgagttgttgccaccttttggctcttatgaatagtgttgctataaacagtcatgtggaggtttttgtgtggccatatcttttcatttctcttggttatgtataaatctaggagtggaattgctgggtcatatggtaattctatgtaacattttgaggaaccatcagactgttttccacagcagctacatcattttacatccccactagcaatgtgcgtgggttccagtttctccacatcctcatcaacatttgttattgtctctttattttcgacaacctacatgtgcaggtttatctcattgtgattttgatttgcattttgctaattactaacgatactgatcatctttcagtatgcttgtcggctgtttatctttggagaaatgtgtgttcaattcctttgcccattttcaaattgggttatttgctttttttgagttgtaaaagttctttatatattgtggataatatacctttatcacataaatgatttgcaactattttctcctataagttgtcttttcactttctaggtaatatcctttgatgtgcaaaagttttttatttttatgagttccaatttatctatttttgtggttgttgctcatgcttttggtgtcacatgtaataatctgttgccaatcccaggtcatgacaatttttttctgtgttttcttctagaagttttataattttatgtcttaaatttacgttcttaatctgttttgagttagtttttgtatgtggtgtgatgtagggggggaccaacttcattcttttgcctgtagatatccatttgtcccagcaccatttgttgaagagactactcttttcctccacctgaatgcccagcacccttgtcaaaaatcaattggccacagatgtattggtttatttctggattctcaattctattccattaatgtatatgtctatcctatgctcataccacactatctccatcactgtagttttgtagtaagttttaaaatcagtaagtatgagtcctcagagttctttttcagtattgttttggctatttaggatcgcttgcaattccctatgaatttaacaatcaccttttccatttctgcaaaaaaggtaattgaagttttactagggaatgcattgagtctgcgggtcactttggggagtattgcgattttagcagtcttaagtgtttcagctcatgaacaggggatgtcttcacatttatttaagtcttcaatttctgctgcagaattttaaaaagcactctaggagagtgtcatttactgatgcatttgatattataaaggccctgtctaggttttgggaccacagatggagggcagtggtatcacctttcaataatgttaacccccacctctagaagatatgagtattttgtgtatggactcaatggagtcaccagggcacagtcacaacagcagctttacaaagtaaagtgacacatagaggcctggatatctaagtaaagtgattagcaggattattgagctggacagaaccttagagatcatataatcagacttctgaattggtgaagaaacctagagagagaggtagctgcagaccagcatagagtccaaggcagacatctggtaacttcatcagatttgtacttttgttttgatttcagaattttgattctgcaacatcaacagcaggaagacatcttacacagaatagtagccaaagtttaatcatttaaacagttcccaagaatcttgttgtagagaaatgacattttatgtggggtcataaaatgattgcatgaaagcattctaagtgtgaaagaacctactctgccaccaaggttctaagtacctgcctcgctgtacccctgctcacgctcttgctctgataggaggggagaaattggctcatgaacttaaagctgctggtgtttctcctcgcttggcacctcccccttggctgtaatgactactcaggagtagagcctctgacttcagacaacacagctgggaagggggaaatggttcagaatccaacattgccttatgactcttcatatttctgtttgattgtggttataacaacttgagaaattctttggctacagttgaaggggtgctcaaccaaaatgatggcagattgttgtttttggcagcacctccctgcagggtgcagatggttagaagcttttgtttcaatattaggccaggcagtagggggagatagagagctccttttttgtcaactttggagtaaattcgtctttcctatgatgatcaaagccagtatctcagtgtcctatcatggtaaggacagatgggagccggtgatctaattgtcattttaggtaagagcccttgggtttatgtgaacacttcagggtcacagaggaagccagtgaggaccagtacctggatcttctgactcctaactacagtgatcatccactgtgttctcctgggagctgagaggccctgcctagtgccggccccctcctctcagtcctctaaactcactgcccttctgtagtattcaagtctgtcctccctaggctggcagctctgtcagcacccaggttgttagaatagttgttaaaacaggtcattctgttgccaagtaattacggggccttgcactcagtaccttcccacgaagcaggccgtagtgtgcttactgctctcccttgcctttccatcccctactttgatgtgggagttttctttctttttacttttcttttattttctttttttccgccagtttccctccaatatgtgaggacttttattgagttaatgtgtgggcttctgtgagtgatttggagttccttggatttcttttattcattttagtctactgaccctactgcttaggcccagtttatagctggagcttttatctgttgggtgtgtgtgtgtttctttattacaatgtgaaacctatgatacttatttttcactccaggaaaataatgccacattataatgtacttcacatacttagtgacttaagaacatgatttgccaacatttgagactttgagactttacattgaaaaagtgacacggttttaaggctttcccagcaagaattcatgcctttagccatagtaccgttttcatatttgtagcccaacttctgtgggcagtgtaacccctgcttgatggaacagtgccactgagtttcagctggtatatgtagcactaatttttcatatttatggaatgcatataatatgaagttaaaacagcacctgggcctcttattactcctgcctgccagaacattcactctggttcaactagtactcagggtttttgtttttgtttttgttttctttttttgattgtaaaagtaatacatcagaggaaacttagcaaataagtataaagaataaaattagtctcattacccagagataactatttttaatttttgcgtatttccttttcctcttagtttaaaattaaactgaatgataacttgcagataattttctgtcatgcttttttcttaacatgattatttttccttgtaaataaaaactttataaacattgtaaatgattgcttgaatacctgtggttggatagtcaatgattatttgtattgagcacttgtatgtttctgtctctgtctcttagctttaggctaactttcagtgtttggattattttcttcctgtagatttctagaagtggttctatgtatatgtgcagatgtctgcttgtcttttaagtatactgaaggtcatatacatttcacggtctctgccaccagaatgcgttcctgctgtaggagttcttgtcttttccaaagcatcttaaccagtctaggacttcattgagcttattttgtataaacctctatacaagttaaggattagtcttttgttttatgaaggagtaaacacagaatagtttaattagactaatggagctctcttctggcttttaaatgatcttgtttacatttgagatagctgtgtgaaaatagcacatacttctactataacattgacttgagtgagcataatattgagagcaaggttcagattgcagaaatttgagctgcctgtttgacctagtgggtgcaagttattttgagcaaggttctattttagtctttatgaatgttcttactactgttaaggtgggccttctactcccacttaaaattgggattctgaagaaagttaaaattggattgtggcatactttgcaatcttggaagttaatctctgactttgtttttctgtctctaaaatgttagacttgaaatagatcagaaagagtcattttctgagatcagggcaaagtattctggttataatcaggagtcaagtgaaacctttgcagatgaaagccatgagccccaaagatatggcatgctttatgtgaagaggatggtactagccagctgtcatgatggctgtgcaagcctccttatttgtttttttccttattgaggtcctttatctttaaacatctgtaggaagaagtatgattagctctctttgcctaattctgccagtagctactttgagaatttcaagcacaataacttcgcaaacttcaactcaacaaaaatttaccagcagcctttctgagaattattggggtttggacagtaattatgaatggacaaatcctacttttactcatgatgtccttttcccagtcctttccttttgctcacagtgtgtctgttctgtggggcatagactcagtaggaattgttccctttaagataccatttaccccaattatggtgcagtgatgatgatctgctttgcatatttcaggttctttttggctttttccattgaagccagtggtcctcccagcgttttatctttgatgtgacttttcattgataaagtaacactttaccttcctgggacaacagattccaacaccttaactaatctgaagttgttagcttccaccttccctcgtcacatgggacctttagggccaatttattttcctgcccacatgagaagtctccagtaaactagctgaaggtcctcagcatgtagcatgctttgtctctccagtgtttaaaagaaatcatcacattcacatgagcataccctctgcaccaccctccctttataactaccaccatatccacttcccttgctgcctctgcttctcagcctgttgcagcttggcatgcatgtctacattccacccaagtggctgtcttcagaatttccccccttccccccacccctgcccccagtggtctaatctcaaaacccaaaaggtacttcttagtctctgcctcttggctccctttctctttttggccctgtctgcagcatttaatattactgtattacaatgtatttgcatttctggtttctgtgtaccaccctctgctggttcttctgctttttcatccttcaataagcttttctccatgcctttattgtaaatgttgccattcctttagccttttctcattctggaccttttttttttttttttttttttttttttttgagatggagtctcgctgttgcccaggctgtagtgcagtggtgcgatctggactcactgcaacctcccacctcctgacttcaagcaattcttctgcctcagcctcctgagtagttgggattacaggcacccaccaccacacccagctaatttttgtatttttagtagagacggggtttcaccatgttgaccaggcgagtcttgaactcatgacctcaggagatccacccgcctcagcctcccaaagcgctgggattacagacatgagccactgcaccaggcctggaccttttccttgagtgctttatacttaggctggcttcagttaccaactggatgttgatggcctacctctagatctctaggtcagacctcttccatgtacttcagactcatgtatctcatttccacagacacctcagacagtatggctgcgacagactgtctccttccttctcacctctcctttccttctctttccttggcttggagagtggcagtgccatccatcaaaatcagacactaggcctcatccagtgtttctcctgatttttttcagctcccaaatctgttgctttggcctccttgtcacagcctctccctcagttcctctgctatgcctctgccaggttgacctcccaccaccatcttccatagctgagtaggtgctacgccagtgtggtttttgctccctctcaatttttcatgaatctgcctcccttctctgcgtctttgtctccacttccatcaccttagtccactctgtcatcatctgtcccccctggatccttgcagtagcctcatgactgatcatctacatctgctcttaggccctataatccattcttcacatggcagccctatgatgtgttcagaatgcagctctgagcatgtcattcccctgtttaaacatttaagtagcttctcattattcctagttcttcgaatatgggcccagtggccaggtgtggtggttcacacctgtaatcccagcactttgggaggctgaggcaggcggatcacttgagtccaagagtttgagaccatcctgagctacatggcaaaaccccgtctctatcaaaaattaaaaaattagctgggcatcgtggttcatgcccagctactggggaagctgaggcaggaggatcacttgagcccaggaggtgaaggctgcaatgagccatgatcgtgccactgcacttcagcctgggcgacagagtgcaggctgtctcaaaaaaaaaaaaaaaagactatgggcccagctgctggcctggccccctcctgtgccctatgacttggcccctgctgacttcctcagccacatctcttgttgtgtcccatggcattttgtctgcacttggccttctttgatctcaggctttacatatgctgttcccactctctgcccaggacacacttccccttgtttactttccatcagttatacttacctagttaattcctgtgttcaccatttgtatctcatgtcaaacagtattttctcagggcagtctttcctcagaccccaccccaaccccccagccccatacactgtcttagctccctagctttttccttcagagcaccacataggttgtcagtctgtttgtggattattgccagaccataaagttctgtctgtattgtcactcaggcatgtccaacccactcctgatacttggcccactgtcctgatctcagagtggcaagtaccgatgtcacttggttcatctctagacaaggtcggtgtctgcctttgatggggactctttccagtctgaggatgttgctcgatggacttcttctcactaagcctatagcttgatggactgactggactatggtaccaccaagtttaaaaattctgtgatttttttttgttttccaatattataggtagacctttaaggaaaaagaggtgccctcggtcaaagatcctttccttttctcaaggcagcttctagtaaatgtgctaaattttaaggatataatcaaatggtttctgggagaaaggatcttgtatcccattaataattctttttcttcaactctgcatgtcttttcttgacatattataaatcaggaagattaagtattgctcataaaataatagaatatgggaggggtgagtgttctttctccatcagatctgtcgattcaaatggaacagtttagcaagtgcctgttctcacccaagcttcccccgtgccataggcgttgttttcattcccatctcatacataggagcccagtgagtttgtcacatgttatatcctaggcacatggaagtgtaggataggaacttggattttctttttttttttttctttccaacttttatttattttattcagggggttcaggtttgttaacatgggtacattgtgtgtcacaggtatttggcgtacagataattttgtcatccaggtaattggcattgtacctgataggtagtttttcagttctcaccctcctcccatcctccaccctcaagtagtcccgggtgtcttatttttcccttctttgagttcatgtgttctcaatgtttagctcccaacttataagtgagaacatgcggtatttggtttgcctcatccatgttgctgcagaggacgtgatctcattcttttttatggctgcatagtattccatggtatatatgtactcattttctttatccagtctactgtggatgggcatctaggttgattccatgtctttgctattgtgaatagtgctgtgatgaacttaggcatgcatgtgtctttatggtagaataatttatattcctttggttatatacccagtattgggattgctgggttgaatggttgttctgttttaagttctttgagaaatctccagactgctttccacagtagctgaactaatttacattctcactagccctttataagtgttcctttttccccacaacctccccagcatctgttatttcttgactctttaatagccattctgattggtatgagatggtatctcattgtggttttgatttgcatttctctaatgattagtgatactgagctttttaaatatgcttgttggctgcatgtatgtcttcttttgaaaagtgtcagtttgtgtcctttacctatttttaatggggttttttgttacttgcttattgacttaagttcctcatagattgtagatattaggcctttgatggtggcatagtttgcaaatattttctcccattctgtaagttgtctttttgctctgttgatagtttcttttgctgtgtagaagctctttagtttaattagattttacttttcagtttgtttttgttgcagttacttttggagtctttgccagggccggtgtccggcatggtatttcctaggttttctcctagggtctttgtagttggaggttttacattaagtcttgatccactttgagttggtttttatatatggtaaaaggaatgggtccagttttaatcttctgcatatggatagccagctatcccagcaccatttattgaatagagaatactttccccattgcttgttatcatcagctttgtcaaagatcagattcttgtaggtgtacagctttatttatttatttatttttttgagtcttgagtctctctttgtctcccaggctggagtgcagtggcacgatctcggcttgctgcaacctccgcctcccagatttgagcagttctcctgcctcagccttccgggtagctgggattataggcatgcgtcaccacgcctggcttattttgtatttttagtagagatagggtttccccatgttggccagcctggtctcgaactccttacctcaggtgctccacctgcctcagcctcccaaagtgctgggattataggcatgagccaccgtgcccagccagtgtacagctttatttctgagttctctaccctgttccattggtctttgtatctgtttttgtaccatttccatgctgttttagttactgtagccttatagtatagtttgaagttgggtaatgtgatgccctgggctttgttctttttgcttaggattgctttggctatttgggctttttattggctcagaatcaattttagaatattgttttctctttgttttgtttttgttagtagatgctgtgcatgcaaaaatagtttttcctaattctgtgaagaatgtctttggtagtttgataggaatagcattgaatctgtacattgctttgggtagtatggccatttcaacaatattgatttttcctatccatgagcatagaagtttttccatttgtttatgttgtctctgacttctttgagcagtgttttgtaattcttgttgtcgagatttttcacctccctgattagctgtattttattctttttgtggcttttgtgaatgaaattgtgttcttgattgggctgtcagcttggacattattggtctatagaaatgctactgatttttgtatattgattttgtgtcctgaagctttgctgaagttatcagaactaggagcctttgggtagacattatggggttttctagctatggaatcatatagcctgcaacgagagatagtttgacttcctctcttcctatttggatgccttttatttctttctcttgcttgattgctctggctaggacttccagtactgtgttgaacgggggtggcaagagtgggcatccttgtcttattctggctctcaagggaaatgcttccagcttttgcctgttgagtatgatgtttgctgtgggtttgtcatagatggctcttattattttgaggtatgttccttcgatgcctagtttgttgaggactcttaacatgaagggatgttgaattgtatcgaaagccttttctgcatctgttgaaatttgaaatgatgatgaagtttttgtttttagttctgtttatgtgatggatcacatttgttattttgcatatgctgaaccaaccttgattcaacaaataaagcctacttgatcatggtggattagctttttgatgtgctgctggatttggtgtgctagtatttcatttatttttacatctgtgttcatcacggatattggcctgaagttttctttcttcattgtgtctgccaggttttggtatcagaatgatgctggcttcatagaatgagttagggaggactccctccttcttgatttttttgggaatactttcagtagtaggattggtaccagctcttctttatatgtctggtagattttggctctgaatccatctggtccagggctttttttggttggtaggtttttaaattactgattcaattttggaactcgttaataggtctgtccagggtttcaattccttcctggttcaatctcgggagattccgtgtttctaggaatttatccatgtcttctaggttttctagtttgtgtgcatagaggttgaacttgtattttctttttttgttgttgttttgtttttgtttttgtttttgagacggagtcttgctccgtcccccaggctggagtagagtggcgccatctcggctcagtgcaagccccgcctcccagattcacaccattctcctgcctcagcctcccgagcagctgggactacaaggcacctgctaccatgcctggctaattttttgtatttttaatagagacggggtttcactgtgttagccaggatggtctcggtctcctgacctcgtgatccgcctgccttggcctcccaaagtgctgggattacaggcgtgagccaccacgcccggcctgaacttgtattttctgacttctgccacagccatctccctccagtagaaaagatatgatatactcccagtcatttggaggtgctaagaaacataaccttattgtttgtttgctaatggaaaggaattgaaatttttttttattatagagagagctgtattccagtgtagtaagtaacctacagactgtcttaccctgggcagatctgccagcactaaaaactacaataaacattgcttaaaagaattttacatgatacaaccaaatacacaagcacacacacaaaaaaatttgtctgttagtttgtctttttcctttctaccctttgtttctcagctgtcctccaggaatgcttgactttaccagtatttggcttaaaatgagaaacctttgtctgtacctttgatgtttgtttgcacaaaaatcaataatctggctttccattaaaatagtccttaaagaagctagtttgtggggtctttgttaacttgtgcaaagcatacatttttgatggtttactttaaaaaaaaaactaaatagtttgtcttatactttagtattttggttttactggttttatgtagtgagggaccccattccataaatgtaaggatttttgaaggatccaggtccatttattaatctgtatctttttaaagcattttatgagcatctgttaaattgaaaatatttagctttatgattatattaaggcttgaaaattgtccagtcctaaagtgtattttccttttttagttttttttagttagtatagacactgacttttcattctccccttgcttccgcatgtccctatgagatcaggggttttgttgtgccagtagaagctcccttatcaccttttgtgtagaggagcctctggggagaaagcaatgccctgaaaatgctctgtggtacaatttcaggtttaagaagctcgctcccatttggagtttcccgtggatggccgaactgctccaagaacattcctccagttataggcattttgtcgtttttccttttgggaaatactttgtgtgtacctttattacgggttttgatagtggagctgagaggccccgagtattgggattggagccacaatttcttctcttctttgtatcttacccagtgtcttactcagcagctcccgccgtgctgtgacaccccagaatgtgtcatttcgaaacgtcacagctgccactaggtcatatgggagcgtggagctggctgggggagaggtgcaggtcagtgatggtttttttttcccacatgggatctttgaagaaaattttaaaatggcactcttattttcaatccaaatattcatatattgtattttccagaaacataatgagggaatgaaattgtggtttaagaggctgtgcttctcaagtgtaggtcctgtggctttagtagcaaggggtaggcctcctggcaggatgagggggcttggcgggtgtgttaaatattggtggggtgtgggtcagcttcccctttgggcttggctttctcaacctccatactatgaagcagtcctttgacttaaattcagtgtggcaggtcacctttaaaagaggggccttcgtaaactgcttcgtgcacgataaccctttatgactcttaattgggggtagccgagcagtgggtgattttgatataccatatgtcctgtagcacaacagggcaagatgatggagatttccaggagtcctctacttagcaagaaggaaaataggtttaataatgtttacattttgatcgttgtttcttagatgtgttgctagaggaaacgcttatagttttgtttgttttgaaaatgaaattcctgtggaaaggtcattgcaatgccagcccctgtcatttctagcccacttatcccagagctcatctgcagtgtgtcaggtctggcttacttctctaaccaaaaaaggcaaagaatgtgtaagccctgctctcttcagcaaattgtctgggtgctccgtgatgggtggagttcacggtgtcagctggatccacaggaagcagggaaatgttatagacacattttctcctgtaagtttagagagtctgtgaggcaagattccaaagctttgccaagagcataaatcctaggctttatctcagaactacacattgggccttaccctctacattgtaaacatttcttggcagtcaaataaacccaggcagtttctcgaaggtgcctgccacctcctccacctccccttcttgaggatcctgacacaggtttgctgcagcaagtcagatatgattcttccctattcggggccccccacggctcttctgggctagggcaggtttgccgcagtaggtacttgccgctgaatggaaggcccacctcagccccccacatctcagtataaataatgcgtgcgctggagaggaatagcaaccagactgcttgggttttgccatgtcttctcttgcataagattggtcgtggaggaaaggcaccctctgaagatgagagtgctggagagagcgttgtgcgctgtggttgagaagagtgcgctggtggggagaggagactgatgggcaagaacgctgcagcaggctcgtcctgcagctgtaaatggcacaggactggagctcttgaattccagttctaggcaggggagcgtgggtgttggatgaaaggtttagtcctgtgttacatacaggactaaagtatagtcctgagtaaagtgtctgaaacaagaagcatgtgaccacctgggcacatcatttttctacctgagtggtacttggtgtactaaagagattatgggatgcagcacacttagacaaggtggaagaatctgagtgggtctcatcacgttggagttggtttttatgggatatggaaaagaggcccggatttcttctgagagcaggagtagctgaggagccccgtggcagcagagctcgtgaactacacttgtgtgagaagacaggctggtaagttgagacacgagattcttggattttcctgagacctttctccttcatctctccagacccaaagagaataacctggaaagtcagctagtgagggtctgcaagacccaactgagagagcttaagaaccagagaatttggaggcaggtgaaggctggagttgtatttgggggagttttgtttggagtcagtcttttttttttttttttttttgagacagggtctcactctcacccaggctggagtgcagtggtgtgatcttggctcactgcagtctccacctcctgggctcaagcaatcttcccacctcagcctcctgagtagctggaactataggcatgtgccaccacgcttggctaattttgcattttttgtagatggggttttgccatgttcgggcacaagtgatccacctgcctcagcctcccaaagtgttgggattacaggcgtgaaccaccttgtctagcctggagtcactgttaatttcttctgttggtccatggcaaggtttacagatgactttgtttggaaagcctgaatctgtttttaaaagcagggatggggagtgggaaatcacagtagttactacttgagtctatttagtggactataaaaattactatagcttcagtttaacctaatcagagcttgccatgaattcgagcctgcttgcctctcttcaggaaattaatctgggtcatttgactgtcccagttaagcaggtacatgttttaacagttttaaaggcaattgctgcctgtatttggtttttcagagtatatacccggttatccttgccaatacatttaaacctcttagcctacagatcttttctttttaccagcctcagtgttttgtgtttttcatttttttgtggagacagggtctctatttcccaggctggtctcgaactcctggcctcaagcagtctgtctgcctcagcctctgaaagcattgggattaaaggcgtgagccaccatgcccaggccagccttgatgtttattaatccttttcagtgacagtctcactctccctctttctttctctagtgattccttcctctgacgcctgctcttacaataggcgtccctgcgagaagagtcacccagtggcatcaagagctctgggcaggatccgtccacttccagagtggcctgaagagtggaacacatttctttttagttaaatgagtttcttcggtaatgtccagaatataatagcctaagcatgatggaatcccccgtaccccaccctatacccccttccaaacagaaacaactgttgtttggttttttggggttttttttgtttttttgtttatttttttgacacggaatttcactctgttgcccaggctggagtgcagtgacacaatctcagctcaccacaacctctgccccgccgggttcaagcaattctcctgcctcagccccctgagtagctgcgattaacaggcacccaccaccctgcccagctaacttttgtatttcttagtagagatggagttgcaccatgttgcccaggctggtcttgaactcctgacctcaggtgatctgcctgcctcggcctcccaaagtgctgggattataggcatgagccactgcgcctggccacaactgggatttttaagaaattgcctaggagagagttagttgaacttaaggtggtgtctaattagagcaaagtgccttccattttaacttcaatgaacttgccacgttggtctgatgataacccaagagtaaggagtcttggattctgatcccagctcagcttctagagacttggtggttttcaaattgttcttgagggactccttcaactgaagggctccctagttgccaagagtggttggttctgagtcgaggtggctttgatttgtcagctttggtcagagaattcaggcagggggcaggaagtccgtgttctgtagttgttttgttattttaccctttttataccttccattcaggagaagtttattagatgaatccgtgtccagaaatagagaattagttgccttcatcctttatattaatttcccttgaagtataaacagccaaagaagaaaagtacttgtgggagaaagggggttcagatcctcaaatttgaaaatagttttcaacttcaggaacgtgaaaggtgactgttaaccaaagtctgagtctcaggagctacttcatgtggtatgcttttacctgatgttatgttttagatatggctcattcattcggcacatgtgctgggtgcctactgtttgctggacactgcggagcctggtggatgctgggggaagcagatgggtctggtcctggcctccaggagcttactagttaaatgtgggagtcattgctaatcatttacgtaagtcattgtttaattttagttgtggtaagtttacaaagaaaagaaatgggctgctaggagagctcactctctacccttttctcttcctttgtagactgtgtgaggagctctcattgcgggtgggagactgattgcctgcagtaatggggagaggatatgcctggttccctcctctcactccttgcttggacttttgtctttacaacttgaactaagtattctccatttgacctttttcctgcctcattattcttcccagacattctctagcttctactttctgcctcttcaggtgtgcatcagggatctggtatcaaggaatttagaacttgaaaagaagtgttatggtccagttccctcactttcagatatggaagaagggaacacatccacggtcacacagcaggttagaggcagaaccaggaccaagcctaggtctctgcatctcagcccagggcttcttgttacattcctgcaggaagggctttctaagtcagcaggggcccagcgtcagggacctacttacccttgcagagacactgagaggacaaaaactaagccccaagggggccaacagccccagacttcacatggcctagggttgttttctatatatcttggcagatttatcaagagtacctttttccgggagctgaggaaagaaaaaaaatatgccccattcctatcattaggggattcatattctagaggaacatagaagtctcacatgtatggagagagcatagagcagcttgctaggggctcaggtacacaccctgtgtgagggagagctctggagcaggaggagatgcggagtcgtctcctggatgcagagcaaggattttcctagagaggtggagtccagatagtccaaggagcagaggagtggaggccaggctttgctagggctaggagaagagagagaccccctccaggcttgcggggaatcctgaaaaaatggtccacacagacaaagagggttaggaggttgtgaggcaggggctgattttgtaagaccttgaactctgctctgaaggaccagatcatggagctagtggggtgccgtgcctcactttctcaagggagtggtttcatgaaagctgggcttttgggagagaagtctggtggcattttaggagccctaggggtcaggaggcctaaccagggacttactgcagtgactcagttatggaatgaggaggccctggtcacagggagtagcagtggggtattttgagcttctatagtgcttgtttgcaaaacatgataaatttaggttaatctccaagctttaacataggaagtataacttcagtgttttttttcttgccatatctaggtggagtccgcaaagaaattgtgaggctcaggtgtctgttttattttataaagcattttgaaacttttgagaaccaacaaaaagagaatgcaaataccaagtgttatttctttctacttccaaatctcaagccctaaattgaataccatttaattcactgttgccaatatggcactctgcgttccttttttgatagaaagttttgccttttgagcatttgaagccctagctttgtgatatagctgaacagggtgggcaggctggtggggacaaggaagaacacgaggacgagagtagctgcccggctccagcagcacccatgccctcggcacgcacagacttaacggtattgtcttctctttatctccttaggaatacaaacagaagcttgcacgagtaacccaggtccgcaaggaactgaaatcccatattcagagcttgccagacctctcactgctgcccaacgtcacagggggcttagcccccctgccctctgctggggacctgttttcaactgactaggatgggtgtcatgtcccagatttctgtttgtaccagcagaaagaagagggcaagtcatggttggaaataaccttctagcccctggttctatcccttcttccgcccagccccccagcctcaagaaagaacctcagactctgattctcctcttcagcctctcatcttgagcacagttcagaacagtggcgactggaatctggtttatattcatatttgcaaagactacagactttttctcccacttcatattttcatgcccccctgttggttttccattcttaactgtctccttatacctaagaagttatgaaaatcatgtgtacttctggaagctttcgaaagaatcttgtccctcatgacagcattttatcatgaaagcagcttctcctttctgggctgggcttgttcaagttcggtgtgggcttccactaaggcacttgtcctggagacgttggctttcccagctgcatctgccccaaaaggttgtaggcacagctgtcgtagcgttgccataaagagtttgccaaatctctgatcctccctttccattgcttctcctagtgatgcacgaagattaggtgcatttattttgtaaacagattggagaatctagcaataagattcaaagctaatctggagcataaaggcacagttcagagacagaataacagggatcacaagcatgaattaaaaggaatttatttgcttcaagttcctagatacaaccttcccatgctgcacttctccactgtcggagcacgttccgaaaaacagaatgccttgatccctggtgggtgcgaaggcagttgttagggatggcaggcattggtgggctccaaaagatgaaggccccacacacaggtgtgctgcatttgggatctgtgtgggtgtttcttggaccctttcttctgggagtagggtacacactaacgtttaatccgctgtctgggtgcatgtccacagtacggtggctaaactcgaacatcactgcaaataggacgctgagcaggtccgtctgtcatgtcacgccactgcacaggtccttgtccccacacgacggggagtacttgcgtcagatgttattgaatagctcgtctcgggcaggggaagcggggagttggggatattaattgggggttttaattctattatcatgtcagctgacattatgactatataatgtagttagagacaatttttatcttgcttatagtaaaggttcagcctgccaattgtaaatcattctaatttggcaggcttatttttgacattggaaagggcagaaagcgatttgccccagtagtgtaataggagttatagaccagaggctgaaacccaaactatataaaaaggaattcagtggagggggctttgtaatctccattaatttgtgttgctacttccaggatcaccaaaaattacatgtaattttacatgttaaacacattgaaacataacctatgtttataaagcataacgggcttcccttccagaagctctcctgcttgtcatgaagtgagaacaatgaaaagtcatagcagatactcagtttaactctgtgtagaacctagtagtgtttgagctgttattcagatttgaattcagactgtgtgttgtttgcttatggacactgcctgtcgttctgtcactgttaaattaatgagtctataaggtttttcttccagaggccataggtgacatcactaaaattgcaagataaattgtaatctttgctgctgctgcactccccaacctctcccccaccccccgtggtgtgctgctttctagatgagcgtgttttggagcaggcccatctgggacactctatgctttcaccaaggaagtgcgatctgagcagccacaatccagccaaaagaggatcgtagatatttgctctgatcaactagatgaaaatatagcagaatggatttagcccactgctctgttttatccaactgagtctctgaccagcaattggtgcataattattacagcaaaagttaagaaatgaaactgtagcaattatgtaaatgaatgtgttggcctcttaatacctgttactagtggacttcctgtgaggaagttagttttttgttttgatgaaatgctttcgttttttaaatcttaattctgctgtccacatcctcccaaagtgtgcttacttcatttgtttaatttaaatgaactttcctccttgtatgtatgaggtgacttggtgggtggggtgggtggtttttgtttttgtgttttttctttcttagggcatctgtaggcctcaaaggacctttcctttaggtcatattcctcagaaagtcttcaatcttcccttgtttttgtttgtttgtttttcttaaagaatattttcaaagcttaaatttgtatattaatttaggactatttagaagtataggctgtcgttggcggcagcagtatattctgaaatgtctcatagatatatatttttgaataaagatggtgttgttgaacaacattgtgtgattttttttttaaactaccctgttactgaaaacagtgcctttctttgtaagcagtgggtgattagtaatcaccaatagagaatgtgctgtcggcacagaatcttgtcccttgggagtttttgtgtctgttagcggcacataaatactcagcatttacgtagtattttctggttctttccaggggcttaattagctttaattaggcagtccacacagtacccatgagaggtgccgccatagttttaccctcattgtacagaagtgggaactgatggagagagattaaatgactcttcccccatacttcacagccaatctctgacagattaaaacttggaagttctttgattttagcgcctttgttcacaccagtaggcctcctgagagcgatttgattttggcagtacacggaaagccacgctgaacagtaaaaagacgaaaaatgtgagataattgcgaacccaagtggtatgtctcttaaaaacagtcatggctttgctttgtccttttcacttgtacatggagtgaaagcatattgactgtgtattgctggttaaagctctcaaaataacaaaaatgattttgaattaggtccttttgaagcaagtgatatgtttggaaggatcataaacctgtccactgggtaatggcagcatctgccagaagaagtggggttatcttatggtgcaaaaacctctgtagtaggtgtggttcatcaagactgcaacccagataagtccagtattaggaaaattgagactgcattacccaagttctgttaaaatatgaaagttggatgttacatgtgaatctcaagagacaagatctccttctgtgtccccagatttcatggtctaatttcttcactcctccctataaatagtaagtccatgattcttctggtttaattagcacttcaggctacaaaatgactttgaggtcttcagagctgaagatggagctacccaagagtccatgaatctgtcaaaatgcttatcctttgtgactagagccattaactctctgtgtcaccttcctgggcaaggtattttcctctctgggcctcagttttttctttcttttttttttttttttttttttttttctttttgagacaggatctaactcttgcccaggctggtgcaaccttagctcactgcagcctcaatctcctcgtctcaagctatcctcctatctcagcctctcaaggagctaggactacaggcatctacccacgcctggccaatttttttcttttcttgactttttttagagatagggactcactatgttgtctaggcttgtctcgaattcttgggctcaagcaatcctcccgccttgacctcccaaagtgctaggattgtaggcatgagccaccacagccagcctcagctttcttacctgcaaaatgtagtattggactaaattatctctaggttttctgcgagccctaaaagctacgattgttgtgctgcataagaagcatatgggactgaagtctgagaactctggatggtatatcctgggcacgcagtactatttgttagagaaatgaatagtatcaccattgtgctgtgtatacataggaaaccctggagaccatagtctaaagatcggggcacaggagacagtgccacgaccgggaagatgggagtaaacacagtagttcactgcacaaaattcatatttggtttatttgggatctttaagaaaaagccatttgctagcatggtttcctcttttactttctcctggaataattcatctggctaaagctcatcgctcactgctacctctgtaggattttccatttaaaaatcatgcttccactctgaggcacagattcaattaagaatccattctcctgtacagtaggttgggattcatacagctttatgtagtgttgaaagcccagtgtgttcactttttttagactcaaatagttattttgcattaaaaattcatttctaccattggtttgataaatattaaaattagcaggccatttatctagtattttttgtgaataagaggcagctgtgatgagtgaaaactcatatcttctcatctcctctcactatgatgaccttgggcaagtcactcagcccttggggacctcagctgcttcttacaggaaatgagtagggttgattacgtaacctctgaagtcctgtgactaggttttcagaatatttcttcctactgagaatcttaataaactcagtacctgaataatgtactccatagattttaaaatactcactatacaaattcttaggaaagaaagtagttaccaacatacttgttaataactgagatgtttgtaaaaagggcctagtgctttggtacaaattagggactcagtggtggctgttactatgttaaataatgaatgcaggtatttataaacacatgtaacaagattaaaatagatgtctgctggaaggagtaatagagaccacatggctagaccatctgcagcatttacaacagagtggtcaaaaacctgtcatcctcaacccccctcacccactttaagggtatgaaaagagtcaggagttaagaggtaaaggaagaggatttgggatgagaattatttgaaaagggccattggtgtgtttggcatctccctagtgggagcagtgggtgccacctacactttatctcaagattaggggaaagggcctccatggagcttagtatgtgtccctgatctggtggattaaacagacccctgcctggaaaagtctgaaggatgagatgccagtgctggctaagtgtttgatgacgaagcaagggagaggctgggtgcagactccactcctagagtttgtcagggcagagcatgcatgtagaagaactggcctgcatcctggggtgatagagcctgggcaagaggcccggggtttcaaggaggcgaacttcagactcacagtgctgaggaaggagtagagcaaagagccagggagaaaccctcaccccaagagaccccaggtgatgggagatgaggatgggagactgggggaagggaggggaggaaccactccaaggagcatctgaggagcccatgggggaaggaagctgttaaactttgttaaacttttgcccagcagcgcccagtcaccaccaccagaccttaaggactgtctcttgctgctgcttcactcccactgctgtgtccctggaagggtcagaaacggtaaacaagggaggcctcccttcccggatgctggcctcccttcccagatgctggcctctcgcccccagcagacccagagaggtcaccttcacatgataggctattttgattgtaacatgggcttgcacatttacatctctgaaatgagactgtttttacactttaagtgtgactacaggaatttttttaaataaaaatgactagagaagttatggaggcctgggtttttctttgagagttacaggatacattagccccacaaattggatttcaagggacataggagacaaagttgctttgcgattgcagttccccaatcctgcctgtgtactatggtggttacacacacatgattcattttaggacctttaattcttggttcccctttccatttttgttacttaaaaagttcattttcacaacctcagtttgttcattaaattgtgaattcataatcctatgtatatgtgaacatatttttcaaaattgtggtaaaatacatataacataaatttactattttagccgggcacgatggctcacacctgtaatcccagcactttgggaggccgaggagggtggatcacctgaggtcaggagttcaagaccagcctggccaacatggtgaaaccccatctctaataaaaaaaaaacaaaaatattagccaggcgtggtggtgtgtgcctgtagtcccagctactcaggagtctgaggcaggagaatcacttgaacctgggagacagaggttgcagtgacccgagatcgcgccactgcactccagcctgggtgacaagagtgaaactctgtctcaaaaaaaaaaaaaaaaaaaaaaaaaaaaatatatatatatatatatatataaaactattttaaagtgtacaattcagtggcatttagcacatctgtgatgttgtgcagccgtcaccatgatctagttccagaacattctcatccccacaacaggaaaccctgtacacattaagcagttactcccattatcccctactcccaggccctggcaactactaacctgctttctctccctgtgaaattgcctatttgtatatttaatataaatggaatcatacaatatatgaccttttatgcctcgctttcatttagcataatgtttttaggcttggttcatctatgttgtagcatatatcagaatttcatcccttgttatggttgagtaatattctattgtatggatatgccacattttatttatccattagttggtgcacagttgggttgtttctacctcttcgcgacagccagttgggctgctgaaagcattcacataccagttttgggttgaacacctgttttcagttctgttgggtatatacctaagagtgccattgctgggtcacatggtaattctacgtttagcttaccgaggaaccaccaaatggttttccagagtgggtgcaccattttccatttccacctacaatgtatgagccttccagtttctccacatcctcactgtattagtcagggttctccagaaaaacatacatagagaaagggaaaaaattattttaagggaattggctcacacaattgtggaggtttggcaaatcccaaatctgctggggtagtctggcagctggagacctagggaagagttgcagttcaaaggcaatctgctggcaaaattccttcttgcttagggggaggtcaatctttgttctattaaagccttcagctaattggccgaggcccactcaggttagggagggtaatttgctttactctagatccaacaagttaaatgttaatttcatcccaaaaacatcttcacagaaacatccagaataacatttgaccaaatatctgggctccatggcccagccaagttgacatgtaaaattaaaaaaataaaataaaataaccactactcttgccaaaacttgttatttttcatttaaaaaattatagctgtattactgcccgagggctccataaaaaaatatcaccgactgggtagtttaaaacaacaagtatattgtctcacagttctggaaactagaaatccagaatcaaggtgttttcagggtcacgcttcccctgaagcctccagaagaggattttttttttgcctttttcagttcctggtagctccaagcgtttcttggcttgtggcaacgtaactataacctctgcctctatcttcctaaatggccatcttccctgtgtttctgtgtccaaatttccttcttttaaggacaccagtcatattggattaaggcctaccttaataacctcatcttgattaaatctgcaatgaccctatttccaaataatgtcacatttacagatgctgggggttaggactccaatatatattttttgcaggggggctggcggcgggaaacacaattgaagctgtaacaatagccatcctaataggcatgaagtggtgtgaggtggttttgatttgcatttttctaatgacattgagcatcttgtcatgttggccataacaacatggccaaatggcttgttggccatttgtatatcttctttggagaaatgtctattcaagtcctctgcccatttttgaattgagttatcttttctgttgttgagttgtaaacattcattaaatattctggatactagacccttaatcagatacatgattttcaaatattttctcccaccctgtgtgttgtctttttactctcttgatagtgtcctttgatacacataaggttttaattttgatgaattccaatttattttttcttttgcctgttctggggtcatatctaagtaaacactgccaaatccaagaccatgaagatttagtcctaggattttatacttttagctcttacatttagatctttgatccattatgagttaatttgtataatcccactactcatcagcatgggagttttgacctgctccatttctgacctgggctggtttacccctccttaggcaacctgatggtcccccactcccaagagtttgccgtattgatgccaaacttattgcaggcacccaaacagcatagtgcactacagcccagaactcctgggctcaagtgatcctcccacctcagcctccagagtagctgggactacaagtgtgcaccaccatgtccagccaaacacaattttcttaaaagtctctaccaatctttaataaaatcatcatctactagttaaatgatattttgaggtacaaatcaataatgaaaacaactaagttagagactttcattcctaccgatgaaggattaaatgctatgggaattgccctctaccataaacaactataaaagcagacaaaatatataaaacaagtgtttcaggcattggacaataggaaacacagaattgtaagtccctgagagaaggaaaacaaacagagagaaggctatgattgcctaccttacttattcagggcacttccagtgtgcagcacaaagatagggaaccagagatccaccgtatccctgaattgaggagatagaaatcagagttcaggaaggctgaggtggctagaacttgcagggaaaaataacaggaagtatctgaacagaaacagagctcaggagctctgcagacagtcccctgacccttaagtgagtcaggaagactgaggtggctggaacttgcaggaaaaaataataggaagtatctgaacagagacagagctcaggagctctgcagaggggcctctggcccttaagtgagttccaatcagtacatgtgtgggatgaaataccatgagatcaaacagaaagaacaaacagaaagcaatagaccccagagctcaaaaaagtctgggaatagttgaggtttacactaactagagtggggagagaccttgtaatacagacagcattggtagaatcctcaaaaagattatgcttttgtagtagggctaaattatccctagagtaaaagctcctcacagcttgccataaaaaaatagcttaatagtagaccttaaatagatccacaggtaacttaactacatggcagaacaaagcctaaccctgtttaaagaaatacaacaaacctagcgctcaacaatgtaaaattcactgtgtttatcatccaacaaaaagtcaccaggcatgcagaaaagtagaaaattatggcccagagctaggagaaaaataaattaatagatccagaatgacacagattattgaattagctgacaaaagccttaagatagctattatcaatattgcaaatactcaaggagataaaggaaaacatgaacataatgaggaaagacatgggatatatattacctaaatccaaagcaaattcttagagataaataatatttgaaattaatctgaatgggattaactgcagattggacattgcaaaagaaaagattactataaccttaaagacacataaatagaaattattcaaaataaagcacagagagaaaagtctggacaaagagtaactggaggaacctgtgggacagtaccaagaatcaaaaatacatactagaaagagaggaaagagggaaagagacagaaaacacttttgaagaaatgtcaaagaaatttggtgaaaattataaagccatagatccaagaagctcagtaaacctcaaaaagaataaacatgagaaaactacacacattaaaacacatcatagttaaattgctgaaccagtggtaagtgggtaaaaagaagcattatatacagaacaacgaaggtaagcatgacatcagacctcttagaaactatgtaagccagaaaaaatagcatgacgtctttaaagtgctgaaagaagcaaagcaaaacaaaacaccatcagtctagaattctatatttagcaaaaatttctttcaaaaatggaagggaaataaagactatcacagcaacaaaaactgaaagaattcatcaccactacacttgaacaataagaaatgtcttttcagacagaagaaaagtcataccagatgaaatctggatctacacaaaggaataaagagcactgaaaatgataactacacaggaatatttttaaaagacaattgactaagcaaaaataataatacatttgggaaaaaaagtgaaatgtatgacaacaacaacatacaggtcagaaggcgataaatggaattatactcttgtgaagttcttatagtatttgtgaagtgttatgtcacttgaaagtagaatgtgttaaggtaacaagtacactaaaagtctaaaacaaccactaaaataacaaagctaagagttgtaactaagaagtcaacaaaggagatacaatgaaattgtaaaaattattctgttattccaaaagatgacagaaaaaggaaaatgagcagagaacagattagacaaatagaaaataaatagcaagatgatagactaaaatctaatcataccagtaatcacattaaatataaatggtctaaacatctcaataaaaaggcagagctaggttggattttttttttttttttttttttttgatacggagtcttgcctcgtcgcccaggctggattgcagtggcatgatcttgactcactgcaacctccgcctcccaggttcaagcaattctcctgcctcagcctcccgagtagctgggaccacaggcacgtgccaccacacccagctaattttttgtatttttagtagagatggggtttcaccttgatggccaggatagtcttgatctcctgacctcgtgatccgcccacctcagccccccaaagtgctgggattacaggcatgagccactgtgcccagccaatagataggattttttaaaaaggcaagaccaagtatatgctacctacaagaaacaaactaaatataaagacacaaatagtttaaaagtaaatggatgaagagatatatctacattagacaaaagaaatctaaataatatcaggccaactagatttcagagaaaagaatactatcagggatagatgaggtcatttcacaataataaaggggtcaattaagaggacatgataatgttaaacatgcatttaataacagagttttaaaatatataatggaaaaactgatggaactgcaaagaaaatagacaaatacaaaattgtagtggatatgtcaatacccttcccaataattgatagaataatgctgtggactaaatgtttgtgtcctccctcctctccaaaaattatatgttgaaactctaatcctcaatatggtggtatatggagatggggtctttgggagaaaattaggtaatgaggttgtgaagccctcatcatgggattactgcccttataagaagaaacagaagagaatttgctccctctctctctgtcctcatcctgtgaggacagaaaggtggcttgtctacaagccatgaagtgggttctcaccataacccagccatgctaacactctgttctcagaattccagcctccataactgtgaaaaataaatgcttactatttatgccatcctgtctatggtatttgttacagcagcctgagcagactaagaccaataagtaggcagaaagtcaggattatagtagactcgtacaacaccattaaccttgacctgattgacatttctagaatactctacccaacaacagcaaaatacaaattcttctcaagtgtccaagtaagatttaccaatataggccacattcttggccataaaacaataaattcaaaagttctctagcaagctgactaaatttttattttaaaaaaattttaaaggattcaagttgtagaaagaaagtacattctctgaccacagtgaaattaaaattaaaatcaaggccgggcacagtgactcacgcctgtaatctcagcactttgggaggccaaggcagacgaatcacctgaggtcaggagttggagaccagcctggccaacatggtgaaaccctatctctaataaaaatacaaaacagccaggcatgattttgggcgcctgtaatcccagctactcaggaggctgaggcaggagaattgcttgaacctgaaaagtggaggttgcagtgagccgagatcatgccactgcactccagcctgggtgacagagcaagactccatctcaaaaaaaaatttttttaaatcaatactgaaaagatcctcagaaaatccccaaatatttggaaactatgtaacatgcttccaaacaaaatatggataaaaaataaatcaaaagggaaatcagaatgtattttgaactgaatgaaaattaaaacacaacataccagaatttgtggagacaacaaactaggaatagaagagaattgctccaacctgataaatagcatctatggactactcatagctagcaacatacttaatgacaaaaaactacaaaatttccccctaagatcaggcacaggccaggcacagtggctgatacctataatcccagtgctttgggggctgaggagggaggattgcttgaggtctagagtttgagaccagcctgggcagcataagtgagaccctgtctcctaaaaactaaaataagaaaaaaaacaatcaggaaaagtccaggcacggtggctcatacctgtaatcccagcactttaggaggcagaggcaggcagatcacgaggtcaggagatcgagaccatcctggctaacatggtgaaaccccacctctagtaaaaatacaaaaaaaaaaaaaaaaattagccaggcgtgatggcgggcacctgtcgtcccagctacttgggaggctgaggcgcgagaatggcatgaacccgggaggcggagcttgcagtgagccgagattgcgccactgcactccagcctgggcgacagagggagactccgtctcaaaaaaaaaaaaaaaaaaaaaaaaaaaaaatcaggaacaagacaaagatgcttttctccatttctgttcaacattgtgctgaatgttctggtgagggcaatcaggcaagaaaatgaaataaaagacattcagactggaaaggaagatgtaaaactattgatattttattgatatttacaggtgacatgatcttgtatacagcaaatcctaaataatccactaaaaaatttctagaactaataagcaagttcagcaaggtggcaggataaaagaccaatatacaaaaaaaattaattatgtttctaaacactagcaatgaacaatccaaaaacaaagaggaaaaaatagaaaaaatagaattaagaaaatgatttcattttcaacagcatcataaacaataaataattatgaacaaattcaacaatagatgtgcaaaagtcatacttgaaaataacaaatattgttgaaagaaaagaaggcctaaataaagagaaagatatcccatgtttgtggattggaaaacagtattattaagatgccaatacagccaggcgcagtggttcatgcctgtaatcccagcactttgggaggctgaggtgggcagatcacctgaggtcaggggttcgaaaccagcctggccaacatggcgaaacctcatctctactaaaaatacaaaaattagctgggcatggtggtgggcacctgtaatcctagctacttgggagcctgaggcaggagaatcgcttgaacctgagaggtggaggttgcggtgagatgagatcgtgtcattgcactccagcctgggtgacagagtgagactccatctcaaaaaaaaaaaaaaaaaaataccaatacttcccaaaatgatctacctattcaatgcaattcctatccagattccagcaggccttttttttttgtaaacattgacaagctgatgttaaaattcatatggaaattgtcaatcttgagaaagaagagcaaagttggaggactcacactgtgagtcccaatttcagaacttactacagagctacaacaatcaagattgtgtagtactgtcataaggacagacataaatcaactgaatggaatttagtgtctagacactaatcctcacattatggccaattgattttcaacagtgccaggactcttcaatggggaaagaatagcctcttcaacaaacagtgctggaacgactgaatattcacatgtaaaagaatgaagtttgacctcttcttcacaccacatgtaaaaatcaattcagaatggatcatagacctagaagtaagaagtacaactataaacctctttgaagaaaatatgagtaaatcttcatgaccttggtttcggcaaagccttcttaaatataacaccaaaagcacaagcaacaaaaaagtacataaattgggctttctcagaattaaaaactagaaattcttcatttggaccctataaaaaaggaaagacagcccccgccccacccagaatatttgcaaatcatgctgcaagtttccgaagtgtaatgaacatttgactacctgtgaagtgatgagccagttattgggctataactgtaaactcctcccccctccccaccatttattaaccacaataatcctgtgacttcacaatatcccctctttacagatgaggaaacagaggctcagagatgtgactcgcccaatagagtgtgatgctggtatagatggaacggggattcagccccaagtccctcttgtctccagctctctttccatcaccctgtattgcttgttggagaatgccagacatagaagatctgcagccttgttttacgccaggggaaactgaggtccaagaaaggaaatacttctccaagttcccgctgccgcctcctgcctcctgatttgttgctgtttgttacagcaaactacagggaacctatacgataaaatctcactcatctgggcttatctaatgcaaagttacatgaacaatcatctattttaaaagaaataatttgattactctttaatttgtgagggaaggaatgttgggcagtagaaaggacattcaagtttataacctgaaagatgtgaatttgagaactgacttgtactttattaattctggaatctaggatatatgactacgctgtgccccagtgtcctcatctctcacatgagagggttgtgctttacccacctctcccagtgtggtgggggctcaggcaagatgagcaatgccactgggcttcaaagacgatggagtcggcacaagtgtagtaattgtttcatgtcaaaaggacgagggctaaagttgctgagaagtagagctctttttgcttctctctctctctctttctctctatagaaatattactgttttaatttaatgagacggctggacgtggtggttcacgcctgtaatcccagcactttgtggggctgaggcggatggatcacctgagatcaggagtttgagaccagcctggcgaacaggatgaaaccccatctctactaaaaatacaaaagttagccaggcatggtggcaggcacctgtaatctcagctactctggaggctgaggcaggagaatcgcttgaatccgggaggcagaggttgcggtgagccaagatcgcaccactgcacttcagcccgggcaacaagagtgaaactccgtctcaagacatcataaattaattaattaatttaatgagtcactaaagattgctgatccattgtgggcaaacaggtactgcttaagtgtttgaaaagttcttttattttttacttctttgagacaggatctcactctgccagccaggctggagtgcagtggcacaatcatagctcacagcagtcttgaactcataggctcaagccaccacacctggctaatttttaaaattttttgtagagatgggatttcactatgttgcccaggctggtcttgaactcctggcctcaagcaaccctcccacctctgccccccaaagtgctgggattacaagtgtgagccaacgcacctggcctgataagttcttataagtggatttggcagtctgtgagagcctggcttgtttatggtgatgtgcctttcccatagctagtgcccaagtcagcaaacttcccttggcctgttcttgtaaataaagtttgactagaacacaaccccacctatttgcttatgtgttgtttgtggcggcttttgccatacaatggcagagttgagtggttgagatgaaggctgtatggtggcccacaacgtctaaaatattttgagcacatgacacctgttaccacctccaggggaagcagtcccactgcacagaggatagcaaagcgtactaatgcctgccactaggagcggcagtccgagaatctcaacctactgcatggtttgctggtgctggggttgccaagaaagccacttgcacaggccttggatggcacaatgctttattcacctagagaagagacagagcaagatcagcctcaacagtcagcatccaaaagccaaaattgacaaatgggatctaattaaactaaagagcttctgcacagcaaaagaaactaccatcagagtaaacaggcaacctacagaatgggagaaaatttttgccatctactcatctgacaaagggctaatatccagaatctacaatgaactcaaacaaatttacaagaaaaaaacaaccccatcaaaaagtgggcgaaggatatgaacagacacttctcaaaagaagacatttgtgcagccaaaagacacatgaaaaaatgctcatcatcactggccatcagagaaatgcaaatcaaaaccacaatgagataccatctcacaccagttagaatggcaatctttaaaaagtcaggaaacaacaggtgctggagaggatgtggagaaataggaacacttttactctgttggtgggactgtaaactagttcaaccattgtggaagtcagtgtggtgattcctcagggatctagaactagaaataccatttgaccctgccatcccattactgggtatatacccaaaggattataaatcatgctgctataaagacacatgcacacatatgtttactgtggcactattcacaatagcaaagacttggaaccaacccaaatgtccaacaatgatagactggattaagaaaatgtggcacatatacaccatggaatactatgcagccataaaaaatgatgagttcatgtcctttgtggggacatggatgaagctggaaaccatcattctcagcaaactatcacaaggacaataaaccaaacaccacatgttctcactcataggtgggaactgaacaatgagaacacatggacacaggaaggggaacatcacacaccagggcctgttgtggggttgggggaggggggagggatagcattcggagatatacctaatgttaaatgatgagttaatgggtgcagcacaccaacatggcatgtgtatacatatgtaacaaacctgcacattgtgcacatggaccctaaaacttaaaatataaaaaaaaaatagcatcagtcccccatggccagcgggtctcacttgggaaccagtgctcactattgcactcttgcagcccctcttttgtgctgcaggtgagggactctgttcctgttccctctctgccaggaacacatacagcagtgggctggccaggtgtcatatgacacccgtgtctaagcagactaaagaagtacacatcagccaggcgtggtggctcatgcctgtaatcccagcactgtgggaggccaaggtgggggtggatcacctgaggtcaggagttcgagatcagcctggctgacatggtgaaaccccatctctactaaaaaaattaaaaatacaaaaattagccgggcgtggtggcaggtgcctgtaatcccagcaacttgggaggctgaggcaggagaatcgctggaacccgggaggcggaggttgcagtgagccgatattgcgccattgcactccagcctgggtgacagatcaagactctgtctcaaaaaaaaaaaaaaaagtatacatcaaggccagaacaggaaaagacatttccaagagaggtgatatacccagcacaggctttgagggttctttactttcctgtatggaaatattccaggccagaggcaggctcttatgcaaccacacaagggccggcagcctgtgtctgcctttcccaacatctttactatctgtccccttacaagaaagagtttgccgatctccagattaatgtgatatgcacttcagcccgcagagatcatgatggcttctgagttattgggttctgaattaatgaggtttctgtgtatttcctaacatgtgctatttcaaactctcagatacttagattgggcagttctcctctccttggcccaggggcccactgtgtcattgtggcctgtcagatctgcatccgggctcaaagccaggttacatgcattctgcttccctggataggatctctgtgacattgctaccctggaggatttgtttctacttcaattaaatcagattagtccactcacatgctcttgtcttgggcaaagagccctgaatttggaacccagttgaagtcccaactccatcactgcagaactgggtgacttgggacaaatcactgcttggcatggggctgacgtatcaagaaggcctaagtatttccgcatctccctggaagccttctccccatgtttaacatgaacagctgcaatgagagacagcactgggatgcttacaggcagcagctccagacccccatgatctgagtttaagtctggatctcattacctaacctgctctttggccaagtgacttcacttccctgtgtcttggtttcatcatctgtacactgggaaggataataataggctctatctcataaggttatggggacttcatgaattgctattgctcaagtaacaagctatatatctgccaaatcaatacaagttgtttgctgatacagaacaatctgtgtaaactcagagagtgacagcctgagatggggcacagctggacccaatcaggaggtcctggagtatgaactgtgtccgcttaaggtcacagctgttgtaagaagatcctggagaaggaccctggccaattgcaggagggtggccaggcctcaaaatcaagttctcccaggaaggaatggatgatggggaacagtttaacctgtaagtgaagaaaaagcaaggacagtgggactcaatggctctggatgaagatggagcataaaaatggttcttgccttgaggttaaaactggggcaagagacggatgttccagtggggagggcttctgccccatgaccaggaagacatgttggccccaccgaggctggctgacccttctcggctggggtgctgtaaggagcttcttggttaaggtgcagaatgggatgagatgaagcatgtaaggcccctcccagatccaatggtccagactaatatttctgttggctttgagattggactgctgataagtgtggtaggaacaaagccattgctattttaacattccaaactttgaagcttgccaagaactttataaagagtgtctgctcaaatttcccaggccgcctcctgatgaagtgctcagtggcctgacattgctatgagaccctccccgcttcctcccatggattatgacacagggatggtgatgacagctcctggcaaggtcaggagtcagctcagcctggcctgagtcatgggaaagtaatttatatgagagctgtcattgcttaagaacccaaagtaggtaggacctccaaactctcttgatatttgccatagttgcctttgaaacctcaaaaaggccatccagacctggcccctagtttacccggaatgcagtggtgtctggactttatttgaatggcctgcaagtctgtaaagtcattcctagtggtagatttcttatctcctcagccaaaacaagcacagagagttctggttatgaggcaataaagtttattaggctctgggattacattatagcatgacctgttatacacggtttcagagatgctgtggttccagtcaagctccccccaccatcatctacccggccaacaatggaacagactggtagtgaactcctggtccctggaggcagcaaaagaagccacttacctgagaagtatgttatagagggtattctgcaaacttaagtagaagaggggctgcaaccttcaatgcctacaaaggctgagaaggcagtgaggaggagggaatttggcccacttggacaggagagacagatggtgtgcctgcctctgcagacggccactgctcaggtcaaccaggtgttggcatgccggattgcatcgccagattgtccgatttttctaaaaggaagctgaaaacctagatttgtatgtaagaatctctcgattttaaatgttggaaactaatttggatcttgttggaacaccagtttgccacttttgcaagtagagttactctctgctgagtatctagggcaggagtctgcgcagctgaccgcggtctcagtaagaaccccttgttataagaagaatctgttagccttgggtcacagtctgtagctttcttcaagttcatcctggcctgccacctgcagccttgtgtggagccattggcctgagggtgaaggggccttggttctggtcccagccctgacactgatgacctgtgtgacctcaggaaagtctctgtccctctctggcctgttaccccttctggaattagcctagtgtgtctctggcccctgccagctcaaccagtttaggcctccacctgggagaaacccacagtggagaattttccaaagcagagctggttcttgatttggggtaaatgattgttttctttctttccttctttcttttcttttttttttttttaatttaagagacagggtctcactctgttacctaggctagagtgtagtgtgtagtggtatgatcataggccactgtaaccacaaactcctgggctcaagcaatcctctggccttggtctcctgagtagctgggagtacaggcaagcaccaccatgcccagctaattttcacattttttgtagagatagggtctttgtatgttgcccagactggtctcaaactcttgccctcaagcaattctcctgcctcggcctctcaaagtgttgagattataggcttgagccacggcatccggcctattttctagactgattgtgcatctttaggtatttccaaaactgagaaaataatttaccagaaaggaggcctcccagtgacttccagcatttgtgccgatggctgatggagtgacctgttagcatttgtcaaatgccagtggtgaaggttaggtggtgacagaaggtagatggggcttgtgactgacggaaaacagcaggtgaggggtcaccccagaggcctctcatctctgtccttacttactgcagcctgggtagtccttcctgtctgtgggcctcagtttcctcctctgaaaatgagaaaatcagtttggctggatggtttctgagtcccctttgagccccggagttctgtgattccaacgaatttatgtttcaaagttgtagttttatcagctgcacaaggacttaaatctttttttcaattcaacagatgtttccccttccttcctccctccctccctccttccttccttctttccttctttccttccttccctcccttctttccttccttccttccttccatccttccttccttcctctgcctttctttctctcttctcttctttcttcttactctgtcatccaggctgcagtggcacggtcatagctcactgtaaccttgaactcatacagatgatcttggagatagctcttctgaggcctgccaacaggtagtaaatgagtttggaattggaccctccaccagccgagccttaagatgaccacaaccaaggccaacacctcgtgaaaacccttgagtccgaaccacccagcgaagccacagaaacagagaaaccactattagttccagctgctaagtttttgggtcattagttcagcagcaatgggtaatcagtgcagcccttctgccacgagctgagctcttggggctggggctgggaagggaagggttaaccccagagcccagactttcaggtgggcagcaaggttagtgcctccagcttgggggaccgttcattacagagttacccagtggttcaaccaacgtttgggtctgctgccagctgggcctcagccctcctgtggcacctgtcagggcaggagcattctgttgtggggggcggggggtgggggaggagggacattctggaaactgactgattcattagcagctttgcctccctgcatctgcccgcgatgcaccagctgcaagtagagccggcacagctgatcggcctgtgttcctggcaggggtcagggctgccttgactcctcagctcccgaccctgggcctatggttttgagtccagagggaggtgttgaggagctcccctaaaccccagagactgctgataaaccaggcccacaggcaaggcgcacctcctgggtgccatccccatcttgtttaatcctcatggtaaccctcccaaagtaggcatgcccatcagcgccatgctgcaggaggaaaccgaggcccaggtttgtgcagctggaacgcacagagctctctgactccagagtccacctgatcatccgctctgcttccttggccccaccatggggagcatgatggatgtggtgcctcagtggtttgggggagctgcttcgaggaagaaggtgggagagttgaggaggcagggctcctgacccccctactccccgctccaccgaaagcagctctactactctgtgctatgccattaggggatcgggtacaatgtttcacagtgtttcacaaatgtgtggtctgaacagagaatgttccagtcccaagtccccataccgtgtgacctgaggagccaataataacccctgtctcctgaggaattatggagaattcagtgaggtcaaacaggcaaagctcagaacacagtgccaggcacacagtgagagctcagtgtggtggtggtggtggttgtggtggttcaaggaaggattcgctttaatcaaagggcctgtggtatggagaaaacattcctctaggcaatggggcgcctttggaggcttctaacagagtgacctccctcaagtttgtgtgtggagaggcctccagcccaatgcccaccacatgggggagccgtgttctctgccagaaaacttgaaataggaagataagcctggtggggcggggttaggggaaagggaggagaaataaccgttgtgggttttctgcgaaagcagagcctaggggaggttgaatggacagtgacaatattagggattgaagtggagccataaatcctggctcattatccccagaaaccagagggatcaggttgacttgaagaggagccaaaggtaagaagagaggctggctcccaaggtgagaagagctgaggtccagcatggggaaggaccagcctctccctctgagtccaggttctttctctggcactcctggaggcagcccatcctgtccctgcatgaaccctgccagtaatagggaactcaatgacatgtgcagtagcctgttctcacgaggttcatccctggatgttcaaaagagcttcctgcctgccgagtgcaaaccttcccccagaagcttcattcaataattcagtaagtctctgggcacctaccatacgccctgccctcatgaggaaggagcaacatagcactgagcaagacaaagtcccaactctcaaggagcttaggttcagctgtaggaaggcaaatattatacaatgatatcacataatgccagatgataatacgggctatgacaaaaattaaaatagagtgacatgacatagtgactacccttgatagggtggacagggaaagtcatgaaacatttaagggcaggcataaatgacaagaagagactagctatggcaaactgcattttccaaagatggcttgagcagtatctcccatcacattcactcttatgcagtgtgactcaccactccttcagcaagagatggagtctatttctccagccttgattctgggtgggacctgtgattgctttgaccaatggaataaggcaggagtgatgctgtgttatttctggatgtaacctttaattactccagtagcttttgcttctgggttcttcggactctgtttcttaggccacttcctcttggaatccagctgccatgctgggagaattctaagccacatggagtggccaaccatgtaactgggctctcagccaacagcaagcgtcaactgcccaccatatgaatgcgctgtcttccatccagccctcgagccttcagatgactgcagccctagcccccatctgactgcagctgcagaaagaaacactcaactgggcacagtcaaccccggaaacataataaattactgttttgtttttgtttttgagatggggtctcactctatcacccaggcgggagtgcagtggtgtgatatcggctcactgcaacctccacctcccaggttcaagcaattctcctgcctcagcctcccgagtagctgggactacaggcgcccgccaccatgcctggctaatttttgaatttttattagagacggggtttttccatgttagtcaggttggtctcgaactcccaacctcaagtgatctgcctgcctcggcctcccaaagtgctgggattacaggcgtgagccaccatccccagcaataaattactatgttatgtctctaacttttagagtataagaaataagtagaacaccacagaatagctttgtgcaaaagccctgaagagggaaagagtttgggatattttgagaaatcaaaaaagtccagtttggttacagcagaatgggtgactggggaactgacagagagaggcaggagtgcgccagaccatgcagctcatagtaaggacaacagggagacattgaatggctaggcaagggcatgcatgattggatttatgtttgagaaactccctctggctgcagggagaagaatgaattctagggggttgtggtattttttaataatgttgaattttgggaggctaatattcattttttatttattcattttttaagagacaggatctcattctctgtcactcaagctggagtgcagtggcttgatcatagctcactgcagccttgaactcttgggctcaagggataccgccacctcagcctccgaggtagttcagcctcatacaatgaattggagtttattcactctttttctattctctggaagagattatcaaagatgaatgttagatagcacttaccaatgaagccatctgaggttgaagttttcttactggaagggttttaacaactgattcaatttatttaattgttaaaggactatctagggttttttattttgtcttaaatcaaaattggaatgttataccttctagtatgttgcttatttcacttaaaatttcaaatttattggatcaaaatttttcaaaatagcctcttttttctttaatgttggcagcatctgtagtgatgttcattttttatttctaatatttttgtgccatttctctttaattaatcttcatgaatattcatcttttaactggagcatttggtcttttgatatttaatataatttatcaatgtatatgggtgcaaacccactagcttattttgtgatttctcccctcccctccctctgtccctccctccctcccttcctccttccttcctttcttcttaccgcctcctccctttctcccttccttccttccttcccattttgaactgattacttttgcgttctatttcccctctccactagtttggggattatgcactgtttttattcttttaatgttatcattgaaattacaacatgaatatttaacttactgaagtctaaatataatcagtaccattgctcttcttccaggccttagaacactgctactctaatttgacatatactccatggttttggtgtattctaattatttttttaaaaaagataaactctacaagacattaatgttattgttttatgtagtcagtgctcagctagactggcagatggattgatcatttctttgttcttcacttctcctttcatctcaagccttccatcagtgttcgtatttcttctacataaagtgtacactgtaacaagtttcaacaagcagaatgtgctctattcttttttgtctgagcatgcttttatttaacccatattcttgaagtacatattgatgagcatggaattttagttgggtagttaatttctttcagcacattgaatgtatcatgttactatcacctggctctgttgttgctgttgagaagtcttcatcactctgtcatttctttgaaggttatttttcttattttctggttgctccttagatttttctctttgtctgtgatgtttttctccttcactgtgatgtctagacgtggatttattcttatcactttccttgagatttgttgggatttttgaatttgtggattagtacctctcatcagttttggaaagttctctgtcattatttcttcagttagtgtgtctgccccattttctctcttgtatttttctgaaactgctattaaatagatgtcagatattttcagcctctcttccatgtctcccaacttctcttttatgtttaacacctatctacttctctgtactatattctggatcatttatcttctgcctcactcgtgtttttctttagctctgtttaatcttctatcaaacccaaccatcgacttctatgtttcagttattgtatttttcatttctagaagttctatttgggtttctctattttttcagttattaaaattgttgcaaaaatatgtaacataaagtttaccatcttaaccatttttaagtttacagttcagtggtactaaatacattcataatgttgtgcaaccatcagtatttggttctcttttaattctgctggtacttttcatggtttctgttcccagtagatatttgtaaggtaacatgccttccttcctgcggtgccccatctagattgctaatcctcacttatctgtacccatcctcccaaatctggaggtaagtctcatctccttttaaaacctttgactggacagtcatggtagaaactaaagccatcatcatttaatcattttgtgtttactcaaaaaacaaagaaacaaacaaacttctattaagttctaggctgttctctagggcatgcaataatgaatcaggcctggaaccttccatggaggacctgtttcccggggggaggctgatatgagaaaaaggatatttagaatgaattccacataccttctttgaatgccagctgtgtgctggtcacattgctgggttctgagtaagcaggaggtaagatacaatcttcttctcaaagtttgtagtagagtagcagagatgaatgggcccttaagtaatcatgtaaaatgtcaaaaatgccaggcacatgattggtgccttttaaataatctctgagtgaatgaacggtgaattggcgtgggagttcagaggagagaaaaattttttctgattggaacatattaaggaaatctgtaatggcatttgagtcaggccttagaaatctgttacttttggacatccaaagacataggagaaggtaggggcaattcaagtaggaaaacagcatgaataaaggcatggactgtctttttattttaaactgctctattgagatataattcatatatcgtgaagtccgcctgtttgaagtgtacaattcaatggttttaagtatacttaagagtcgtgtgaccatcaccataatttaattttagaacattttcatcatcctaaaagaaaactactcattaagtcattccttatcctcctgcctctcccaccaccacagccacaagcaaccactaatctatcttctatctgtttatttattctgaacatttcatataaatgaaatcgtacaatatgcagtcttttgtgactggcatttttcatttacaataaagttttcatgtttcatccatgttgtagcatatatcagtactttattcctttttattgcagaataatattccattgcatgaatatactgtattttgtttactcctttattcactgcattcaaagaatggatgtttactatcatccattgatagacacttgggttgtttctactttttggctcctgtgaatatttgtgtacaacttttatgtgggcatatgttttttattctgtaattccaccaggaatgggattgataggtaaaatggtagctctatgtttaaccttttgaagaactgccgaactgttgccaaaacagctgcaccattcgatgtttccagaagcagtgtatgaaggttttaatttttccacctccttgctcacacttgttattatctgtcttatggatcatagcgttctgctgggggtgaagtggcatctctttgtggttttgattttcatctcttagtggctaatgatgttgaatgtgagcaccttttcatgtgcttattagccatttgtatagcttttatggagaaatgcctattcaaatcccttgcccatctttttggggggagggggacaaggtctcactctgtcacccaggctggagtgcagtggtgccatcatagctcactgcagcctcaaactcctgggctcaagggatcctcctgcctcagtctccaaagtagctgggactattatgtgccacaggtccagttaattgtttttttgttgttgttttttagaaatggggtcttgctatgttgctcaggctggtcttgaactcctggcctcaagacatcctcctgcctcagcctcctaaagcactaggattacaggcatgagccactgcacccagactatttaccttcctattgttgaattgtaagggttctttatatattctggatgctagactcagatatataatttgcaaatgtttcccccatcccacggcttgtgttttcactttatggcattctatgagatggaaaagtgttaaatttttatgaagtccagtttatcagtcttctcctgtattaccaatgcttttgctattatatcttatgttctgttttgtaatgtggggtgagtcccacgggcgggttcagtttgtggaaactcatcaggctgttataatttgtacttttctgtgcctgtaagacttcaaaacccagttgtaaaaaacaggactgataataattgcagcttcctttactggctcatcgtgaggactggatgggcaaacatactcatagtgcttagcacagagccagccactgcttagtgctgacacgtgggggtgaagttgttactgtagttattgtttttttgtttttgtgcttgtttttgtttttgagatggagtctcgctctgtcgcccgctggagtttagtggtgcgatcttggctcactgcaacctccgtatgccgggttcaagcaattctcctgcctcagcctcccgagtagctgggactacagctgtgtgccaccatgcccagctaattttttgtatttttagtagagacagggtttcaccatgctggccaggctggtctccggctcctgaccttgtgattcacctgcctcggcctccctaagtgttaggattacaggcgtgagccactgcgcccggcctgtagttattgttaaaatccagctctgtcccttgtcgggtggtgatcttggccctaagtcactttaccttgttggccctcactcttctcatctgtaaaataggttagcaccatccacttcaccagggccaccagggcccccaatgaaacaagatgcgacatcatcaggcttgaagtctgcctccaagagggcctcacaaaagcttgggttcatgaaacagggaagaggaaagagaaaaatcagactcatgattgaagagggaaaattgtcagtgcggtgatgagtgtttgggtgcctgccacgaactgggtgtggggcggcccctcagagtttccacaagcagggttggccaggcctgggaaggaatgaagcgggagttggccaaaagagagttgtcttccaggggagtggggtctggtggtgccagggcgctcagcttgggcagggctggtgtacaaatcttggctttaggcctggctgggcaaaagttgattgactctcagtgcagaacaatcagaaaccaaacctccctctagcccctggccccccacccccattggttgcccctatgtgattccagtcttcctgtcttcacccaaacaatcccacccacacctcccctattcctttcttgttcttgaggtctcgctccctgcccccatcaccaggtcaggttttaagaggcctaaaacttataccatcggaggagagagtttcattaaagtagaacatgtatagagagaaggcacaaatcatgtctacagcttgatgaattttcccaaactcaacacgctcatgtaaactgacattcaagtcaagaatcaggccaggcatggtggctcacgccccagcactttgggaggccaaggcaggtggatcacctgaggtcaggagtttgagactagccaggccaacatggtgaaaccctgtctctaatgaaaatacaaaagttagccaagcatggtggtacacacctgtagtcccagctactcataaggccgaggcaggaggatcacttgaacccgggaagcggaggttgcagtgagccaagattgccccactgcactccagcatgggcaacaaagggagattctgtctcaaaaaaaaaaaaaaaaaaaaaaaaaaagaatcggaccattattcccagcatcccagaagcctctcggtacccctttcttgttatccaccccttaaacataaccactctcctgacttctgacgtcatagatgagttttgcctggttttgaactttatatgtttgaaatcatccagtgcgtgcccgggtgtctagcatctttttttttggtttgagatggagtctcactctgtcacccaggctggagtgcagtcgcgcgatcttggctcactgtaagctccgcctcccgggttcaagcgattctccttactcagcctcctgagtagctgggattacagttgtgcaccaccacacccagctaatttttgttttttagtagagatggggtttcaccatgttggctaggctggtctcaaactcctgacctcaactgatccgcctgccttggcctccccaaagtgctgggattacaggcgtgagcgccgcgcctggcaagagtctggcatcttttacttaacatgttagcaagattcaaccatgtttgctgcatgcagctgtactttgtttcctctcattcctatagcggcccttggaatgacaataccacagcttctatgtccactcagcaagcgttgcattttggggttgttttcagctttgggatgtctgggggaaaagctgctatgaatattcttgcatgtgtcttttgggggacatacgggctcatttctgttgagtcatccatgaggggagttgctggctcacagggagagatgaatgttccgctgtagaagattcaaggactgcaaattgtgttccagagtggccacaccagcttcctctctcctcccagctgtggaggaaagtcctgccattccacatcttcactgacaccttgtgtgtgtgtgtgtgggtatacacagtatgtgtgtgtggtaggacctagttcatccatgcaatgcacacagtgtatgtgtgcatatatactgtgtgtgtagatatgtaaacacacatatggtgtgtgtgtgtatatatatatatgtatccccattattctgagccctagtccttccctcctggcacctctcacttcacactggtggtctgtctgaatgttctgtgggacaagcctgtcctcaggacctaaatcagcacctggccctggcctgtattaggagctatatagatgtgtgtaagtatatatatatatatatatatatatatatatatatatatatatacacacacacacacacacacaaataggtagatacacacacacatatatgtgtgtatctatttatctattttttgctttttcatttttagtcattctcataaggaggctgtgataccacatcatggttttaagtttgagggaacgtctttaagaaaaagaagccaggcatggtggctcacgcctgtaatcccagcactttgggaggccaaggcaggtggattacctgaggtcaagagttcaagaccagcctggccaatgtggtgaaaccttgtctccactgaaagtacaaaaggtagccaggtgtggtggcatgtgcctgtaatcccagctacttagaagtctgaggcaggagaatcgcttgaacccgggaggcggaggttgcagtgagccaagattgtgccattgcactccagcctgggtgacagagcaagactctatctcaaaaaaaaaaagaagaagaagaagataaaagaaaatgataaattgagtacacgaaaaagataaaagtaaaagaaaatgataaattgagtacaaaagtaaatatttataaagaatgtgaaaagaaatcacaacaaactgctggagactttcaagtttcgattcctttcttctgagtgtttctgagcatttctgagcctgtttcccagaaatgtgtgcattcagatgcttcctgatagtgacctgggtccctgccctgtgtgaacactgccgggcttcctgggattcctggtacggggcccctgcagatgagtctccctgaggcttaaatgtcatcagcttcccaggaagtcgcctctgcctggtgctcacctctggcccctgcctaacaccccagccccagctcacaaacttccccacctacccctcctcctcttctgggctcaaaagctcccctgctcacaaacactccagctcaaaaactccccagctcacaaactgccccacctacccctcaccctttcttggactgactcttcctccccaggctctcagcttccatagtagcttccaagaaaggccttctctgacttccttgtctaggatattctccatttttaagtccacagcctgtgaccaatggcaacagagcagaaggttagagcaattactgtggatggagcttgcccagtaggcctcctagctccattttctagctttgtgatctcaggcctgtcctgtaacctctctgggcctcagaaacctctctctctctctatatatatatatatataataatatataataataatatataatatgtataataataatatataatatttataataataatatatataatatgtatatataatatacatatacctattatatataatatacctattatatataatatacataaacctattatatataatatacctattatatataagatacctattatatataatatacctattatatataagatacctattatatataatatacatatacctattatatatataatatacctattatatatatataatatacctattatatatataatatacctattatatatataatatacctattatatatataatatacctattatatataatacacattatatataatatataacacacattatatataatatataacacacattatatattatatataatacacattatatattatatataatacacatatattatatataatacacattatatattatatataatacacatatattatatataatacacattatatattatatataatacacattatatataatatataatacacattatatataatacttattatatattatacataatatacatattatatataatacataatatacgtatattatataatatacatattatatataatacataatatacgtatattatataatatacatattatatatattatactatatataatactcatatatatacatattatatatacatattatatataatactcatattatatgtacatattatacatacatattatatataatacacatatatacatattatatataatacacacacacattatatatgtcttatatataatatacatattatatatgtattatattattatagatataatatacatattatatctatatataaaatatatatgtagagagagagagacagggtctcattttgtctcccaggctggagtgcagtggtgcaatcttggctcactacaacctccacctcccaggctcaagggatcctccagcttcagccccccgagtacctgggactacaggaacgcgtcaccatgcctggctaatttttttttattttttgtagagatggggtttcgccatgttgccgaggctggtgtcaaactcctggactcaagtgatcctcccacctcagcctcccaaagtgctgagattacaggtgtgaaccactgcacctggacttacagtcttattttcacatataaagcatcttgtttaaggctcacaatatccctaggaggtgtaccctactggaacccctatctcccagaaaagggtatggaggggactcaggacctgagttgcccgaggcacctgacctcaagcctgccctgaaaaacgccctgtgctccccgagaaggccccgcatagtgcctggcgcagagtgtgactcaaaaacattgattcctttttctccatccctttgaactttcagaacccttgagtattgtattttttttaaaattcacattgaagtatatcatgcatacaaacagagtgcgatcatgcatatgcggttgacacatcttcccatgttgaacgtgcttgtttacccagcacccggatgaagaaaatcacaaccatcccaggcccctgcagcccctcaggctgccttcggcctctctaccaccaggggaagcatgatcacggctgttggtgaacttcacatgggtagaaccgtgtagtcctttgtgtctgcctatgaccctcatggtggggttgtcatcgtagagcctgcgttctcaaggctgtatgcaccatcatttttccatcacttttgcttttgatgggtctctttggcctttcccctttgaaatggaacacagggcttctcggactcccagacgtgtctctgtgcctctgcccaggcctgttggggagggaggtggggaggctgggggagtgtatgttctgacccagtgccagccccaagtaaacgtgcttctaggaggccctggcttggccttccaccctctgcccctccttctccgactccatcaacattctgttgttctgagcttggcttgaggccaatgggtgagctggcgggcatcctaggtaaacaaaggcagctggacagaagaaagtctttaggggtgggagggtggacccaatcagaagccctctccacgagggctgtgagagcttatatggggttcctgccctgagagccctggaacatggtaggacgggagggtgccggtagaggttgggccttctccaggctaggccctgccccggggagggaagctgcctgggttcaagtcccagctctgaaacttaccagctgtgtgactttgggcaaatttcttaacctctctatgcctcagttttttgatctataaaatgaaggcagtaaataactcattgcatgtaaaggatttctgacctgcagtcaatgttggctgttaggaggatgatgtgccgagagacagctaggtacttgatgtgcactattttattgaacctgcgcattagtcatggaagtagacaccatgtcatccccatttggcagataaggaagtggaggcacagagagggtgacaacctgcctgaagccacactgtgagtctgtggcagagccagctctgatccggagtccaggcccctggcaccaagctatgagcagagcttgggtggggattggcagccctgacctgccaaagagcagtgcccagcactgtccttgtggggcccagactcagccctcacatggggtttgaggggcaaggcctcaggctcattttctctgtctgtaaaatggacatatgtgccccaaagagtcagtatccttccccttcctgggttcctggctagtgggctccccggagtggggcaggcttgggggctgatcagggaggcctgtgcacctgcccagtgtcagcagccctggctggagcagccctgcccctgctgtatagccgggaggctgttcaggcctggaagccagagttggcagcccttgttggggctgtgccctgaccctgccctcagggtgctccggaagaagggacaggcacagaaactgctattcctaactaaggctgccgagtatccagtatcgtaaaggtctggggaggtcaaggcagttggctgcagtccaggaaggcttcacaaaggaggcctccttggggcagggttttgcaggttgagtaagagttcattaggtagagaggatagtaaaagtgtttttagcacagggaatggcaataggtcccaactactccatccttgcccttgcttaccctctctgtatttcagggggctggaagttggaaaatgacattttccagagctgcttcccagccggtttcaggttgggatctgccagtgggaaagaggcctgaggaggggagatgccagcctgcctctggctgcagcctcaggtggcttccgcaggctctgtatttcccagcagctatgttggttctagggctgtgggcgccagctcgtgggctttgcagctgcttcccaatttctaggtcacactccttctcccatctgctcctctgcccctttggatacttctggaatgaacttcctctatgaactccctctctgcctgaaatagtagtgcggtttctgttttccagctggtgactcactgatacaattatcaagccacccagccagcaccaggttgtagcgtccaaggaacagaaggattcggcacccagaacacgtgatgtcatgtttttattttgatttattttttatgtgcatgtcatgtctttctacatgacttcccaagggtggggactgtccccatcatctattcattcaacagatactcatgagtgcttcgatggtggggaatgagatgaatgaccaagtctgcacatccacggaatcgcagtctagacctgcttcatccagtactagccagactggctaccgagcacttgaaatgcagctagttcaaattgagacctgctgtcagtataaaacacacaccacatttcaaagattgagtacaaaaataagaaggtcaaataccttactaattcttatattgattacatgttgaaataatgttttggatatattggattaaataaaatacattattaaagctaattccacctatggcttttttactgttttcaatgtggtcactagaaaattctaaattacatatgtggcttgcatttgtggctcatgtattatttctatgggacagcacaggtcttgtgggagttgagttaggaaacattcatttaccaattcagcatttattagtgtatttaagagatacgtggtccctgcctcgagggcttcagataggatggagaaggggacagataggccaacgtggaagtaaaatttactgtgataaatgtttgaattggtccatattccaggactctggggacccgaaaagatatcaaggaaggtttcacagaagaggtgactttggtgttaagcattataggatgagtaggagtttgccaagcagggaaagaaaaggaggggcactccaggctcagggaactacatacacaaaagccaagaggtagacaactacgcagggtgttctggggatacaggaagttaattgtggcccaaaaacagactgttggtggaaggggccggagatggagccagcctgtgtaggaccttgaatgccagtaaagtttaaacgcagggacagggctgaggctcaggaaagactcctaggcaggaagtgggggtccaggtgtgagcgagctcacctacccatctccctccaaactcataaaggaacagaccagacctagtttgagtgtgaaaaataaactattttatttcagtgtttgctccttgcggttcagaagcacatctactgcctggttggaacccaaggcttttataaaaccgtagagaaatagagctctatgtatagagaaaatatacatgttgattaattgtgtgactctttcctgtgcaaagcagaaagttctaaatgcaacagcatgattctctccaagtccttccctgggatttggggggccctggaggctgtgatctcacctccaatagagaatccccaattcttccagcccaagggaggcccagtcatgtagaaagagcaggagataaagtcaaagctgacaactcatgggttccccaagcttcctccggggcaggggctatgtttgggggccttagccctgcaaagaaggggtagctggggtgccaaccttgttggttagtgaccagcactggcagctaaggctgttgggaagtctaggcattgcagcgggcaggctcatgggtagagcaggggtgtccagggctcttctcccctagaactggggtctgaagggtggtacctgggcataggaaggaaccaggacagggctggggacagaaggtggtcacagtcatggtttcactctcagaaatatcctgggcctatggcttaaggcttcgtggagcagggagtggaccttgtggttatttacaaggctgggccatataaaagcattgcaaacatggagtggagaggatccttggagatgagctggttcaatcactcctctgaccaacaaggaaacaaaggcccagagaggagaaggcagtgcctggccagacgtgggacctgaacccagccagggctctgactcccagtcccccagtcccctctctacctccttgtcttggctgagtctttttttgataaaggccccagacagcctctccgacagtctcaggtcaggctggggttataaatggagcagtggactcagagtcagaggcccagactctgctcttgggccttcacattacccagccttgctaataaccacgaggccactggtgtggagggggctgcctcctctctctaagcctcagtctccttatcctggaagcagcgcccacaacagtttcccatggtgattaaatgggttggaggccccgtgagccccagcaagtgtgggaggcacccagcacatagtaggtgcttcacaatggtgaggttgagggggagggctattaagcttgggctgctgggatgtggaggggaccttgggcctatcactgtccccacccagctctggctgtcccaagggcccctggagctgggtgcagtcatgggaagaggtacgggatgcagtctagggagctggattccctgatccagccaaggggcatgctgtcccttttttgcctgctccaaggagctatgaagtagatcaaacaatatggtgggtggtcaatggctttccaaagggcatctgggcaggagagggaatgtaggtctttcctctctcaccccagccccagtcagccaaggtcagggctcccactgtttctggcacagagcattcctcacagcaaagggggtgagtggggacccacaggctcaggaggctgagatgggccaggggcacattccatttccgagagcccccataggctgcccaccctgccctggggtctggggcccaagaaggggcatattttgctcactagcttgggataaggattgggatcaaggtgggggctctcagcaggctgggagcaggggtcccttaggcggggccaatgatgacattccggaagcccttcacagccttcagcttgtcgctctcgaagttcaccaccagcttgtggaggcccatgtggagcggcagcaggtccattctcaccttaacttcctcccctgcctccacggggtctgggctgcagggagagagggggtggtgaggaaaggggcccaaggcctggctcccgcatgctggggtccagccaggaagtcacgtgacctccgaggatcagcacagcgtgtccatgaatgggcctcattctcggccctctgcggggcctggacaatctgccctcctagagtgaacagtgcctgtgcacgcatgtgtgtccgtgtgcataaaagcagatggtgcatttaggggcacaaggggataggctcaggtagccgtgtgtgtgaaaatgtattgagctgtacataggtgatctgtgctttttactgtatataagttacattacagtaaaaaagtaaaaaagaagtgtgtgctcgtatgtatgtgtgcagctacgtatctatgtggaaacacccacgcatgcatatgtgtgtgcatgctcatgtgtggacattcggagggcagatacctgtctatgtgaggatgcacgtgtctgcaggtgagcgcctattgacggatgatgtcactgtggaggtctgtggcagatctgtgcatgggtggtgtcagcattgacagagaatgtgacggtgggaactctagccccagggtgtctgggagtgggcacagctgtgtgggagatgagaggaggggattttcagccagggcttggtacctaaggacagtctctacccccaccggcatctgcccgcttcccccaggccccaaagctagagcagccagcacttacatctccaccgtcttctgctcctcagtcaggccggccccctccacagtgaaggtgcagccttccagggccacagggagcgggttctgcagggacacctcagccaccagcttgcgtttctgcttgggctccccaaggatctggaagagggcatggggcagatgtcaagggcaggtgggatccaggctgggctgtctgcattcactgcaatttggcccaatatttgctgaacaaagctgtacccaggtctgccacgatcaccccccctccccccacctctgtgcctcagtttcttcatcgggaaaacaccgattgtgctaccggcccaggtctcctgcatggagctgcaatgaggctccacgtgacccaggggatgtccaaagtgcctcccttgtcccagggtctggaggggaaagatcacaggcttttgagccaggctgatctctgcctcttcttcactgtgtgacctggggaagttactccccactctgtacaccttggattcttcatgggagagaaatgcctgactgagggttcttgtgaggattaactgagctaatatgtgcaagcttccagcagaatgtctgacacactgctcactgccgctccctctgctgtttaccatttaagtgtaattgttgcccttaggggttgtgggctgcggctcctctaagtgaagggctataatgatgatgatggcgatgataaggatagttagctttcagtgagcccttatcatgtgctgaggatggctctatgtgtttcctgtggatatgcttttaattcttacaacacccctcagtgctattattaaccccatgttacagatgaataaactgaggcacagaggggcaaactcacatgcccagggctgccctggtacaaattcaggcagtgagactctagtctgtgcccttcactcccccaccccaccctgccccaccagtgcccagtgcctgggggttccagccttagtagtatagcatttgaaggattcatgactctaagatccccaaattccatgaccctaacactctgggattttcagattcattcctagaggctacgagtccccaattctctaggcttcatgatgcttttcttcgatgaggctaggatttgaggatcgctaaggcaccaaaggtctggagcttgcagggatgcaggtgtgtggggtgggggtagggatctgccctctccccagcgctgagctgccctgggaccctgccccttgcccagcctgcccttacccggatcttgatttctggattctccaggtagaggtccctctcagccagcaggtagctgttgataactggctccacgaggagggcccgcaccttgatgaggttggactccgtaaggcagtcacggtatttctcatagaggatgcaaagaggaacgctcttctctgcagaaggggagaaaggagggtgctcatgatgcagaatcacccctcccaactctcttgcaactccaagaggcacagagaggggaaggaatgtgcttggggtcacacagcgggggaatggctgggcggatccctgaactccccactgtggctccagggttcccagcgaggagctggagagtggacactgagcagcgggtagaggacgcacttggactcccacgggccttggttctaatcctgcctttgcctcttctaatgggtgaccccgcgtgagccactccacctcccaggtcctcgatgtttggatctgcgtggcacaggcactcctaaggctgtgggaggatgagctgagcgagtgtcccggaagagcctggtgcgctcgggactcagggtgtgtgagccgcgggcccttcatcctggggaggatcagagccgacatctgcttgctgcaccaggcactgcacttcccacggcgggctcctacttcacctacatgacaaccctaaaaggcttgtacgtgtattaccacccaacttacagatgagaaaactgagtctccagcaggtgaaataacgttgtcctaggtcacacagctgatatgtactgtgcaggcatctggactaataatccagatcttagagtccaacaatatggtccacactcactgaagaatgcctctcatggacataaggtcatttccctccacgaggctcgtgatgctgtacccgttgcacagatgaagaatcacctctgccagtaagtgctcagattgggagacttgcctcaggccctgtctggccactcactggctgtgtgagcccggggagatgacctcccctctctgtttcccctctgtttcctctctgttcccagatcttatcacctgctgggcagaggtaagaccaagggtcgttgcagagcaaaagccgcacagtgatatggggatgagaaagaagatggcaggaacaaagctacccactgaagtgtggttcttagccccatgtttctgaaaagaacactgaggctggaggaccttagcagtttagcattttaaggattcatgtagtttagcatttaagaaaacagacctggggtctgtttgtaggaggcagggaggagcagtaaataaatacaagtagttgggtgtagtggctcgcgcctgtaatcccagcactttgggaggctgaggcaggaggattgcttgagcccaggagtttgagaccagcctgagcaacatagtgagaccccgtctctataaaaaatacaaaaattcaagccgggagtggtggggtgagcctatagttccagctacttgggaggctgaggtgggaggatcgcttgggcctggaaggtcgaggctgcagtgagccgtgattgcaccactgcactccagcctgggcaacagagtgagaccctgtctcaagggggaaaaaaagagagaaaatacaaacaaagtcatgcatattcaattctggccagatacagtgatgtgctgtggactctgagtttcagacctgagtctactgctaaagagggagattggcaaggcttaggaggccagaggcaaatcagcaccctcagagactttccccaggaggtcaccagaaggacggattgagacccgaggagacagtcactttctcactgtgggattcaaggttcaggctttgaccttgaacctttgaccgtgaacactggtggtctgcgtcctcctctttggaaaatgctgccccgacctgcccacctctttggcctttcattccctgggtggatctgctccaacctctcatcagatgatgtgatctggggaagaaaaccaaacttttgtgccaaaaaggacaaaagagggtgaaaattactaggtcaagacctggtggtgcagagtggaaattctagctagctccacaggaaagaagaaaaacattatcctccgggggcttggaggatgtggcccaactgtcgactattctaggaggtggaggccagggcagggctggacctttgaaagtctccgtccacaagccagtggccacggccttggtcttgggccagatgctggctgggaagaggaaacctgtatggtcagtctcaaccattctttagacaatttgccctgttctagaaggttactctggggacagtcaccgaggccacattggctgcattcctgtgacccacctggagggatgagggaggagagagcatgaaagggtggaggcaggaaggagaagagaaagaagcagcagagaaaggaggcaggggtgggggcaactggattcctttcagccatccagggcctggcttcctgtccaccagcacacggaaattccccagatcttatcatcaaagaataacaagtaactcaaccacagtatgggggcttagagggaacgcatctcagcttgagcttggcattggaggttccaacaggggacttggaccagcctcactttccagccagaggccaatgcccaggaccttctgtcctccccttcctctccctgaaggctatgtctccagtggatccccaacaggagggacctgctgctcaccctctgtggtgagcatgttcctgggaggatgagaaaagtcagcatgcttggctgatgccagtgcggaacaatgctctcagggtcccgatggtgacttagaggtgagggctgactccacagaggcctgggaggaagtgattttggtgtgtctggcccaggcctggagttcacctcatgccactcattctaggacagacactttctccccttggagcagctctgagcacgagaaggagctggtgggtgtgcactgaaacgatgggactgggtctccaatgtcaagcccaagacttcaccactgctcaatatatccgtgtaacaaaaccgcacttggacctcctaaatgtatacacacacacacacacacacacacacacatacacacacacaaaacagggctggaagggctcttaaaagaggaaagcaccttcccctttgtgtgaatggggaacccatagccttgctggaggagaggaatacccaggagcccacagccaggcagcaggcagcaggcagcaggaactagaacttgggtgtccttgtgtcctgaacccccacacgcctgtagagatggatcctgtctcggactctcggggcctggatgagcagcgagggccgggtcctttctacaccaccgaggtgtcagggacacaggaacccccgagcccagggctgacaccactgcctgggacagaaggtgttcaggaaaggtcccgggcttctcgcctccccacgcctcttagcactcgcactcagggaggagtgagggccccaccgtgtgctggtgctgctgtgccctttccagatacctcctgagcacgcatcctctccctcagtcctcacggctgcgggcgcatcaggcaggcatgtcatcaccccatgtaacaggcgagcatgacctaagactcagagagcatgttcaccgcgcccaaggtggtgcattcagagggcagcagagctgagattcaaagccaggtcttcctggcctcgggaaatgtctttcaacagcttcagtgttgggccctgtcctggtaccaagaggatctgccctctgagggcctggcccctgctgaggagtctgccccgggccggacagtgggtgtgcccagggcgtgcagctccaggagtgcccacggtgggcccaagatagaaaaaccaggaggcagcaactgtcaacactgcagacgccccgcccgcaacacagacctgctttcttaggagggtgaaagctgtgccccagacgccagcccatgggcaccaagggtccaggcactgtcatagaggagagggacgaccactggtttgacaggcaggagtccggggaaaacagacggggaaacaaactctgtaaacacaaaccatgccccacccgagggctctccagcatctccaggtgtggccacactgaatcccaggcatgagtgcctactgtgtgcacactctcttacccccgatggtcctgcactgttggatcatgacccccaggagcctgatggggacgctaaggtgcaggggagtggccatttgctctggtgacacagcgagatgctgcccaaagacgatgtcctacttgattccactgcccctcagaggatggccaatgtctcattctgcagctcccaggtcctctcctagcctggaaacccctctgccctcctcacacctgcagggctccaaatggcagaaagtgggatggggctgctgggtggtggtggggctgctgggcggagccctgggcttgattcctggtccctcactgcctcgctatgtgacctcagtggccacggctcctctgagggcctcaagcttatatttaggaagataaccaggcacagtgacaaagccagacagtggaagggacccagaggacaaccactgtgcaggaagcctggtgacaaagtcttggctcggggctgggttgggtggtctaatgacaccatgtcactgcgaaggggatctgcctaaaaaggcaactaggctggtgctggggacactggagagggacaatcaagtccaggaagaaagcacttctccctgcagaggcctggacgctcccacctttggctcgccgatctgctctgcccaacatagcagcttctggccacatgtggctgtctaactttcaacacaattaaaactttagttttggccaggtgcggtggctcacacctataatcccagcactttgggaggccgaggcaggtagatcacttgaggccaggagtccgagaccagcctggccaacatggtgaaatcccatctctactaaaaacacaaaaattagctgggcatggtggtgcacgcctgtaatcccagctacttgggaggctgagattgcagtgagctgagatcgtgccactgcactgcagactgggcaacagagtaagactccatctcaaaaaaaataaaaaaacaagcaaacaaacaaacaaactttagttctacggttgcaccagccacatttcaagcgcttagcagccacgtgcagctggtggcagccatgctggataggcggtgcagactcagcacgtctccatcactgtggaaagtgcaacaggcactttccaaggcgctgggttagagacttttctttgaggccgagagcaaccagaggcacaggagaggttctcgaagggcccatggagagaggctgctgaggcatgaggggctggagacagtggaattcactgggagagggcagcagagggtctgtgaaagcagtcaggggtcacacgaagatgaggtgaaaccaaacagtatagctgctgtgaggacaggttaactccccaactgtgcaaccttaagaaaattacttaacctctctgtgcctcagtctactcatctggaaaacggagccatgttagaatccaccccctcactcttgcaataagaattaagtgggttgatatttataaagtgcttaggacagggcctgccccagagtcagcgccatgtaagtgtctgtggggtgaaatcacacatgctaagtggttaggtcactacctagcatgttgtcagttggcggtcaacaaatgctccaggaacacagggctttaccagagaaaggctccaggttgaggttgagcaggtacttggtgccacactcgggccccaagatcccattgtagctgacggtgcgggcacagagcaggaggcggcagacgtactcctcagcggtgttgttggtgatgtgggcaaagacgtcaaagtcactgcccatgttcatgctctggcccacacggatccgcatggccatccctgtctcctccttctcggccagtttgttcaggtggttcgcccttgtgaaggcctccctctcctctgaggaccctgtaggggttgagaagagagcctcaatcacagctggaatagatcacaggaagggggctgcaacagggcgagctgtcttcgcagaggcctgatgactcagggcagccatgaaggagccccttctctacatttctgggccagaaggacacagcatttcattaattttccactagtgaactcctatacatccctcaagactcaaccccaaatgacccctcctccaggaagccctctctgaccactccttcccctgtgttgttttctgtttcaaacttaccttcttgagctgctcgagggctaaggctgtgttttacttatccagtgcctacaacagtgcttggtgcatactaggcacgaatacagtgcaatctttcttaccttcaagcaattacacagggattacttctacctaaaatcctttccctccctgtctctgattgctcccttccttatattccatttgcctctctcctgtgctcctttgatttttttctcccagtgttgttgggtgcatatctatttattctatgaaactatcagctctagacctttcaggggatggggagagcatcatttcattctgtgttatccctttcagctagagtatggccaggcaaccctggaaagtcagtgagggtcaggccaaggcaggaactatggtttcttagtcccctctgtatgctttgctatgcttagtatttgcttagaaattagataccatattgaattggctgttcgatgtgctcaaatccaatttttaaaaataaatcaagtcctttcccctgcaactgatttaacatcagtagcagagaactctttccctaaatgaataatcctctaccactgtccctcaacatgtttgctcctgtttctaaggcattgctgaagatggagtatagcctacggggccattgctgtacgtaggctaccaattaaaacacacgcacacacatacacgagcctgccgggctgggaaaactggatgcttatcttcaaggctgcattaaagactctgagggcacataccctctgggtatttgtaggtgtgggtgatatcctcccgctcgtctcggcccacgctcttagtgctgatcttcagcccaacgatcagggaacggttgatggatttgtgcacagacccatcgtcctgctggatccagtctaccacgtcggcattgacctccgcaaagacaaagggcgcatcgtacttggtgctcaggtcgccctccttgatggcacgaactggaactgggccacagcagtacgtccctggcagaggtagaaaggggaagggatgggcctgggtgaaggttgggtggtgtcctctaaaacgctccacaattcaatcacatgtagccaaaaacctcaagaccacgcggccctctgacggaaggactccacttccaggagggcaccacagggcaagggttcagaataggggctctggagcacaacttttaaggttcaaatcccagctcagcctgttattagctggtgactttgggccagtcactaacttctcgaagcggcagtttcatgtggagataagatctggaccacctaatgagcattcctgaattatagatgtaaagctcatagcctatactaaatgctatgcaagtatttgataaataaaatggaaatgtatcccagacatcctgaggaaattatggagccaaggacaggcaacatgttagcaaggaggacatctgtctcgtttcctgctcatactgagagtggagctcagtgccccgcatggggccagccccagggcgtgtgtgttctccaagtgaatacgggtgcctgatgtttacgtaagtgtggttgataaccgccccacactgtccgcagacttccaatgctgaggactagaggctggatagatacagtctagcacatccatgtgatggaccacggtcacattaaataaaaattcaaatcacagaaaactatctgctggagaaatgccaatgctttatccagaagtggacagagctgggaaaaaatgttccatgccgctggaggtcttaaaccagggcccacggatccccccaaggcactaccaacagaattcaggggtctatgaaccctatgatggggaaaaaagggtatctttgttttcaccatagcactttcttcaattgcaaaagcaggaaatgaccatagcagcctgaggagcacttaggacttgtcactcataagaaccacaggcgtggtcattacaaccttacagctgtcccagatggcaggaaattaatttatgctcataaattatctctacaactatattatggaacttactgactctaccgctagatcttgttctataaagaagcatatgttattatatcataaattcattttttaaaacttgtgacaactgtattttaatgtaattggttttctttgtaacgctatgtattatattttatacatttaaaaatattcctagaaagtgtccatatgcatcacaaaattgtgccttagtgtactctctctttcaaacacacaggtactacatatatatatgtgtgtttatatacatacatatataaacacacacatatacacccgcatacaaatacacgatttgaaatcagtggaagctcgtgtgaatgttaatgctgcttattttagagggaggagacaaagatgctatttgatttttttctttgagcttctctgtatttcctgctttccgcaatgcacgtgaattatttttgagatttatcaagaagtgtgttattaagatgtaagtgaggtcccccacccttctgtggacccatcagtggtctccgggtgagctcctagttctgccgccctccagctgagtcactttaactctccaagcctcgtcttccccatctgtttgacgcgacagtgcccgcccacgcaccttcgctcttctcctggggcgttgggtccagggcctgccagccctcgtaccccggctgcaggtccggcctggtcatccacgactccacccagcagtggaagttcctgagggggataggggggcgggaatgaagcagaacatgagcaacattcatcgccacctcccacgggcagaccatgcattcatgtccccagatgcaagctcgcctcgtcccaaactgagcccagggtgtctccccactgccttgttcttccccccacgggggcccatctcacagcaccctctctagccaaggcgcccactcctacacctcagagcccttctcaactcctctcccctccttgcccctctcagtggcccctttgacctcctaatttcttggctccatcccttcttttctgtccgttcagggcttatcactccccacctggaccacgccccagccccccgcccatctcttcccctctagccctcctggcagttgtcagccccgccctctcccactctgaatccttgagtgacaacctattgcttttggaatcaagcctgggccccctaatgtggcattccagactcccgacaacatttgcagcatgattcttcctgaggccccatcatgtatgtggttgactttccctctaggccttccccaagcctgctcaaatactgctgaacttttaaggcccaattcaaatgtgacctcctccaagaagccctccaaggtttcctctccatggggccctccctactgggctccgatcccaccctggcccccacctcaccagatcatctcgctcttgtcaccctggatctccccaaactcattgcggaagtactcgatgagaaggttgctgttctggtcatgggccgagttgtagttggtcacgacgcgggtagggatgcccaggcacctcagcactgttggagaggagtggaaagcggggtgaggtcctggagacatccgccctgctctgggcctccacctgcccatctgcattccagggaacactgtacctgctgtccaagtgctgagaacatgagccagcccttcctgccgggacaatggcgcccacctctctggtcaccccatgtccattctatgcccctcacatcacagttgccagaaggagactctaaaatacaaaccccggccaggcgtggtggctcacgcctataatcccagcactttgagaggccgaggggggcctgaggtcaagagtttgagaccagcctggccaatatggtgaaaccccgtctctactaaaaatacaaaaattagccaggcatggtggtgcacgcctgtaatcccagctactcaggaggaggctgaggcaggagaattgcttgaacctgggaggcggaggttgtggtgagccaagattgcaccactgcactccagcctgggcgacagagtgagactccatctcaaaatgaaataaagtacaaatctgatgtcaccactcctgtgatcaattgtccttggttccccatggcccttgaggtcaaggccagtgccctggccatggcccttggccctgcagggtctggcccctgaacccctcctcgcacgctgtgctcctccacactggcctccagcatgctctgcctctgccagcttcaaggcatcggtgtctgcaattccctctgcctggaaggctgcctgccaggttcaggttgccccatcatttgcattcatagcacggctggagatccttcatccttccagtgtacaggcatgtgagggattctttaattagtcctccaaggccagtgagggatctgtcttatgttagatcctggagcccagcacaggcctgtcattgactattttgtcaaatgggatgaaggagtggaggaaggagagaggagaggaaagagggagggagggaaggagtgattgaatgactgactctccccaagatagggacttaaagactcaaacagcagaacaggcagaggagggcacagaggtcgggagacccagctgctttcagctgtgtgacctgggaccagtcccttcatgtctctgggccttggttccatctctttgtgcattagtgatgccactgaggactcatcatcattcccaatgtacaagaacacggatgcacgtggccctataaataggtcgcagcacagatcagggtcctcagacttgtccggagggagggccctgcatacctgccaacgccctgtttgctgggaaaggggctgatgttgcaatgacaggttaaacagcaacaggacattgactggcatctgcaagctgagctcagctcagagaggcgaggagcacaggggagggaggaaaatcccggtgtggatctcacccacacggcccactgggtgctcctggcagacggaattatgggtgcttttactctctcattttaaaaatgtgctttttatgtgtattgtaaaagtaacagattcccagaaaaaaatatctaaaaaatgaagagaaacaagattaggcgtaataaggtaatctgtgggacttttgttttacttttagttttgattgaagttgagtttgggagtgggggagaagggatgcgacctttgccctggggccaccatcgataggccagggtaagagcttactggttggccctggattcctgccaggagatttgtaggagcttcgaggaaggaggaaggaacagctatgacctccccctcttgcctggtttctgtccccctgaggcctgggcagggctcagccctaaggctgccctcagtgaaggctggtgtcctaaccacaggtcttatcccaccatgcagtgggcctgaggacagaccggaggacgggggaggtctgtctctgctttccagggagccaagtgccactcttgccccaggggtggtgtcccgggaggcctcctcatcagtctaacaggaggctgccccagcaccgtgcacacctggatcagagactgaccctgctgctcaccagctgtatgaccttgggcaagccactcccctctctgagcctccatttcctcctcagtaagacaagctaataatagcagcttgtggggatttgtggtgattcagagagaggccgcgggtgtgggcacagccttgtctgcccattcccagagcaagcattgagggggtgctcgggaacagcacagtgtgtcatggtgcccgttacggcaaacgtcgtccatcagtgctggctgattcatggacattgaggaagtacagtgagggatccggctaagaaagctggaatgccaggctcccctggaaatccccaaacccaagcctaaccggagccagagactgtgctaagtgatctctccctggtattaagagcttcctatgaatgagatcagtcaccattgtctccattttatagatgaggaaattgaggcttggaggcatcaattctcttgcccaagtccacccaggggttagtggcagagctggattcaaacccaggcagtccagctccagagttcatgggccaattcaccattggctccccacgtgaactccacggccacagtggtcagacagcccttttcttggccaagttttccctggctccatcctacacagcctgggaagaggctgcggggaccagaacacagccctgcagtgggcagctgaggggcaggatctgctgctcaatcttcaggcggccacagcccagggtgaccaggatgaccagggtttctgccggtgagcctggggatccaggtcttggatttcggggtttttccaggaaaacccatgggcttctttgaaaagaggtgttttagggctctcagagggaagtgtctggcatgaaggagtttccacaagaaaaaggaattcagaggtcacggggaacaggcagtcccaggcagagaggcaggagtcagaaggcaaggacagccgagctgagaacctaggttaggctgccctgacccagcctgctggtgtggaggatgtgctgggggccctgccaggcaccctttcctgggccttagcactggttttggaatcagaaaagctggaagccccagaccagccttttagattgagcctggtaataataatagtcgtgacaataaatagtatcatcacataagtattttctattatgcacccaaaatcattttaagcacttcccacattcatttatttatttagagatgaggtctcgctctgtcacccaggctggagtacagtggtgcaatcatgactcaccgcagcctcgacctcctgggctcaagtgatccccctgcctcagcctcccaaacagctaagactacaggtgcaccaccaccacgctcagctacctcacacatattaactcatttaatcctcacaaccatcccagtataaaggtactaccgttgtgcccattttacatacaatggaactgtggttcagaggagttaagtgatttacctaaggacacacagctggtaagaagcagagctaggatttgaacccaggccttgacttcagaatttgtgctctctctctttttttttttttttttttttttttgagagaggatcttgctccgttgcccaggctggagtgcaatggtgcaatcatagctcattgcagccaacctccaggggtcaagcgatcttcctgcctcagccttctgagtagccaagactccagacacacaaccatgcctgctaatttttattttattttatttttttgtagagacaaggtctcactatattgcccaggctggtctcaaactcccggcctcaagcaatcctcatgtcttgagtctacgttcttagccagcatgtgatgctaacccattctcataagcaccatcatcagcctggcaacaatcatcgacattttctggccttaaattttgaagatttttgttttagatttattttacttttttggttttaaattgctcgatattccccctctacattttagaacatgctttctttcttgacactgatattactgttaggatccagttattactggctaatatttgccgagagtgacactgggctaggttctgtgctgagtagcttcatgtcacacccactctaggaggaaggtcttgatgttgtccccattttccagacgaggaaactgaggttcagaaagaagtcatttgctcaaggtcacagagcaagtggtgggagggagggggtttttaactcaagttaaaaatcctgagtttttgagaacgtgggctccagtgcccaagttctcagccctgagcccatgcagtctctccaatgatagcccttgatcctaacaaccactggagggatggctattggataaaggaccggagagggtggtcacaggctctaggccacatagcgcattgagagtgttggtggcagggggcaggaccagggcagggatgtcctgattcctactccagtgctcttcgtgccccctcccagggctcatgacccacatcccagcgtgcagctcacctgtgcaggccacggcggcgaagacccagcactggccatacttgacgcgctggcagccgtggttcttccagcgccgcaggatgtccacgctgccgatccaggacatggggctgacgccgtccccgtagttgttgtcccagcgtcccagcagcacaccctggtcatcgttgcagttgacctgcaaccagtggggcagcacggggactgagcctgggatggggtgtcggctgtgccgcctgggtgagcctgagtacagcagggggtgaaagctggggaggggagctccagggtgaggaaagagcaggtgcaaaggggccatcgtgtgacagactggtgtgcggcagatggtgggggctggagccgggggacaggagggagatggggaagaaggaggtggggcagggtcaaggacttgaacgcgatactggggatgtgactctgtcctatgaacacaggattgctcgggagtgacatggtgtgatctaagttttacaaagacccgcttgggccccccaccccagattgtgtcgttccccctaaactcccattacctcgagaataaaatcagcctcctgaccatgatccaagaggcccttctggtctcacccctgcccacctctgcagcttcctctgcacccacgggccctgctcactccactccaggcacactggcctctcttccttcctcaaacctgccaaagtcgctcccttctcagggcctttgcacagctgtgccctctgcctggaatgcccttctcctgggtaccaccttagggagcccctcagcccctccctgagcctggccctgcagtccaacgctctcacacctcgggttccttcagagcgtgcaccatcatttatgaaccatgtgaactgcctgctcgttcatatggtagtttggttagtgtctgtctcccctcccctcccctcccctctataacacagtctccataaagctagagatcacacaggacttgcacacagctgtctccccagtgcttaggacataagtggtacttgataaatatttactgaagaaatgaataaattaattgctctgggggaccccatagcatcaccctcatctgtgcaaatcttatctttccaatataaggtcttttccccaagacttacccatctcccgggtcccccaccgcgcctagcctgtgtctccactgcgagggagaggcctgcgggagccccctgtaggccccgcccctggatgggccatgccactcactcaccatgccactcaccacccggcccacgtagacggggctgctgcggcgggagcagtcacggccggcgttcttcaggaacttggggttgacatctagaaggatcaggcagatgtctaggatcccatcttcaaactgtgtcagaggaaacaagaggagaaagagggagctgggaaggcacctcctccaggaagcctgcgttgaagcctccagcagctgtttcccactctgtcccacacagcagactgggacactccggccgagtctaccaaatctctctggtggcagcttctcttggcacaggagggaatggagtgggacaatgactgggtgagccatgagtgtgtgacgaagagggtaacaattttcatccagggcctggttgggggaacctggaaatctggagcaggagcccatggagtgggcagcccggtgtccctggggctccccctcagagtcaccttgggccctgtcactgtccctttctcctcttgctcagccaaatctcccacttccccaaggcgtgacccaccctgcagagctgatgtcagccccctcgtccccctccaacccagcccacacacgctgctctgatgggaactgagacagattctaaatacagaaatccagtcccatcactcttctgtttcaaccgtatccacagtaaaacctagacttcaccgtgcaaacttcaaggcccttcatgatctgctcccatcccctttttgacctcatctctcaccactcacacccacactcactctgcccaggctcactgccccagggcccttgcatgtgctatttctctgctcagaatgctcttcccgctgctctctgcagggctcacacctcctcatccttgccattcaaatgtcatctttctcaaaagcaggaccccttcttgccaccttccactggaccacccacctccaggggcccttctgtctgctcttttccccccacttctgtggtcctttcctgggccagatctccctccaagctgcacaacagccttccacggtgtgaaccctctgtggctccctattgccatcggcctaatgttcagggctgttccacaaactggacactgctggcttctcccacctcatctcttggggctccttcacacacaaggtatgccccaagctacaatatacctctcaggcacgacataaactttccaacctctgagctttcacttgcatagttcccttggcctagtatgtcgtgcacacacctccttgcatggcaaactcctatttgttcttcaaagcccagctcaaatattccctacttcaagaagtaccccctgatccccataggctgttattccttccttcctctaggtctcatcttcctggactgtgatcacctccagaagctttgcaaaggccatgtcccacagcccagcacaagaccggatacaaaacaagaccctgtgggccgggcgcggtggctcacgcctgtaatcccagcactttgggaggctgaggcaggcggatcacgaggtcaggagatcgagaccatcctggttaacacggtgaaaccccgtctctactaaaaaaatacaaaaaattagccgggtgtggtggtgggcgtctgtagtcccagctactcgggaggctgaagcaggagaatggcgtgaacccaggaggcagatcttgtagtgagccgagattgcaccactgcactccagcctgggcaacagagcgagactccgcctcaaaaaaaaaaaaaaaaaaaaaaacaggaccctgggaaataaaggaagaacttgactttgttctccttctcaggagagaataaaaagccatgaaaaatcagagccaattcattttctgatgtattttatgcatcacggtcataccaccatttcatttatatcccacagcaggctacggggttgctgagcagttagttttgcaattatcatcatgatattcagatgagaaaactttggtcaaagcctgagatcatacagggaagatttccctatggtttcagggtaggaccctccctagagggtcattgaacattgaaacctgacccagaggctgctgggggaagcctcagggtgaaccccaccccaggaggccaatacctcctaacacaccaggaggttgaggggccaggggtgcaatggttcttgctttgtgagttttcccagcagagtctcaagaatttgtacaggtggctggatgataaatgaaatttatcatcaccagtttagagaaccagcccaggctggcccactggggagtgagaaaccacgtgaaacagatgagccattggctgagccagatggtaggagcctaaaggtcaggctggctttactgactccagccaagcccagcctagacagccatgcatggctgacccacagacttgtgagaaataataagtgattgttgtttttagcccctaaatttcaggcttgttatgcagcagcagctagcagatacaaccagatcagcagttcccaaagtatggttattagacaagcagcatcagcatcacctgggaacttgtttgaagagcaaattctcaacccctagtgttttaagactctcagtgatcctgagaaccactgatctgggtgagggtttaaagcctcttcttagcacatgcctagcacacagggctcaccccagcacaactccaagtactgcctattgtttcaatacatgagctttactgttccctcttccccctcccaggataccaaccagcttcacagttcccaaaggctctcctagttctttctccaccttgaatccaaggctgccgcctttgctgtgtgacctcagggcagccttggccctctctgaaccttcagctgtttcagggcctttgcatccctgacagcatgaagtgggtgactctgtgactcactcccacctgtgcagctttggctgcccccagacacagggccgggcacacagaagggcctgagatggttgggagagacagggtgtggcccttacctgcccaaaattccaaggtatgttcttgatgaacttggccgagccctggtagataaagccctgctgggtgaggacatactcctgccgctcctcttccgagtccaggtacacagcatccgctgcaggcaggaagaaagggacctcagctctgggtctgcggaggcccagggtccctgcaaatctggagtcaagggtgccaattccctaggccaagccagcgtctcagggatccatccttcttttaattagaaaaagtaaccattaatgaataatcccacgtcaatgagataaggtgttatcggttagtgacaacaaaggctgccatttcttcaacactcactgtgtgccaggacctgtgataaatgtatgacctgtattaataaatttaatctccagaagagccttatgaggaagggatccttgaaagccccattttaaagaccagaaaactaaggctcaggaatattttatagctaggaaaactgagactaaggacacaggagcactggaccgggagtcaggaaactcctgattctcacttgctgtgtgaccctgggtaggctactttgccttctctgcccaccttaacacctcactgtgtcagcccaaaatgcagatctgaaaggtgctttggaaacgaaagccctgaggtagcgtgagggaggcgcatgattcaaggcagagagaactcagtagcagaggggaaggccaagaaagggttcctgcagctcaggagaggtggggtcctgtccagcttgagagagttacagagggctccctggaggaggtggcatctgaatgttgtcttaaaaaatgattaagttttagagagttggaacctggagggtagcattctaagcagaggaccagaaagcacaaagctttggctgctggaaaatgcagggcatttagttgtctgtggccagtgaggggagaagaaggagctgaggaagttggggcaagatggtaggagcccaaaggtcaggctggctttactgactccacttaaccggtgaagaaactgaggccaagaaggggcaatctggagccccattatgactttggtgagccccaggcactcttgacttcatgcattccttcctccattagaaaaaaggtaattgaatgttatgactgccttggttaattacagctatctcaatattacatattaaaacctattgttcaacttaaatgttcatttttttctcctgattttaaattacattaaaacatgttcacgggcccctaagagtttctcaggccccaggcacagtgcctgccgggtctaatggagaagctggcctgggaaggaagcagctgccggcccctcagacccctgggctttgtcatgcccgtctgcagcaaccagcagccctgactttcatcgtagtgaggaaaaatgggaaagaggccaagtctcttgtgtattctgatctttggctctggaaacttctataaaaattaaccttgaagtcaatgaactataatggctctgcagcagccggggggtgtgggataagaatgaaagagaaagaagaacccacagtgtttcaacattagaatgagtgtcagcacttgttgaattgtccccaccccagctcaggatgccaagactgtgacatccccagctcaggtccccatctggtaaaggtgggggcactggggacgtgaagccttgcatataactggcactcgatcatattggtcttggaactgacatacaggagggtcccattttccaggcagacccggccctttcccacccatcagactgatttcctcccgcagcgcccctgcgctcaccccagcccaacttcctgcctctgcatcaccagctccacagttcccgccccgggatgtgggtcactttagtcactgtgccgcttggctgaccgccactccaacccgccgccgggtgaggccaagcaggaggaagggggccatcccccagaaccacgcttcccattccctgaactctgaaaccttgtggtgtggacgagggtggggacaccggcgtgttcctgtcctgttggcagagctgccaactagttgctaccctctgcagattgactaaaattcaaaacaaacctatggggcggggggggggatccagtaaggccacttctgtcccgagaaatcattccattggccacagggtatgaagcaagggtgctcgttgacgcatggtccctgcgtgccatgagcctccaggcacaacctcatgtccatcagtgggggctggaccatccacatgggcaagaaacaggacactcaacgcccttagaaagaatgagcagatgtggccgggcgtggtggctcacgcctgtaatcctagcactttgggaggccgaggtgggcggatcacctgagatcaggagtttgagaccagcctggccaacatggtgaaactctgtctctactaaaaatacaaaaattagcccggcgtggtggtgcatgcctgtaatcccaggtactcgggaggctgaggcatgagaatcatttcaacccgggaggcagaggttggagtgaggcgagattgcaccactgcactccagcctgggtgacagagagagccttggtctcaaaaaaaagaaaaaaaaaaaaagaatgaatgagcagatgtatgcagaccaatgtggacagagcctcacggtgtattgtgaggggaaaaaaccaagttgtaggttaatgtatacagtgggatccttttatgtttgtgatagagagacagagacctataaaatacagcaatttctccaggcacatacagactgacctaaggaggtgagcccccgcaaaatatctaacaatggtgtcccccaaggaggaggggtcaaagggggaggccatttctctgtagtcttgaagccctccccttctctccccttttttggagacagagtcttgctctgtcacccaggctggagtgcagtggcacaatcccagctaactgcagcctcaacctcctggactcaagcgatcctcccaccttaacctcctgagtagttgggactacagatgtgtgtcatcacatcggtctaatttttgtattttttatagagacggtgggtttcgccatgttggccaggctggtcttgaactcctgcctcaagtgatccccctgcctcagcctctcaaagtgccgggattacaggtgtgggattacaggtgtgggattacactgcacctgggcttgaagcttttctaaagagaatgctgtcatggtttactgttatactgggaaataaaaatcaaaatatggaaaggtgaaaaattttaaaagctttctgctcaaatataaaatgcctcaaaatagagaagaaaaaagataaagcagtgggccagcaagaaggtggttgtctaacagccaggaggccagaatttctgcccttttgaagagggacacccgattcccaggaggggcctggcccatgatgcttctttccctgctttgtttcattagaataggaaggaaacagatcattagatctgactgccttgctagttagatgggaaaatcgaggcctggggaggtgactggcaacccctgcctcctcccccttgctcaagtcagtttcctttgttccaagctctcccctctgactttctagttttgtccaaggttgtccacttatttattcaaagagattccaaaggccacttcaccactctgagcctcagtttcctgtgtgtgaagtggggaagtgtcatctcccccttgggattgttgagaggcccgactgagatagtgtataaggaggcagctggacggtctaactgctcctactcacccccctcccccagccctccccccaacctcacctccgggtttcccttccccaaaccagtctgggtgagatttaaaacagggcctcccacctcagccgggcacggtggctcacgcctgtaatcccagcactttggcaggccgaggcgggtggatcacctgaggacggtagctcgggaccagcctggccaatgtggtgaaactccgtttctactaaaaatacaaaaattagccaggcgtggtggcacatgcctgtaatcccagctactggggaggctgaggcaggaggattgcttgaacctggtgggcagaggttgcagtgagctgagattgtaccattgcactccagcccaggcaacaagagcaaaactccgtctcaaaaacaaaacaaaacaaaacaaaaaacacacaaaaaacagggccccatgaaacagaaccaggacacagtgcctgggcctaggcatcagctgggcaccctattcctgatgtggggcttttgaaaccaagtcaccgctaagccccagttcatagtggtctgggaatatacaggcctcaaacagcgagtgaagtcccttggtaaatatgtggaattgggcatatcattctgcttctttttatttttatttttttagagacagggtctcaccctgataaccagcctggagtgcagtggtataatcatagctcactgcagcctcgacttcctggacacaagtgatcctcccacctcaacctcccaattagctgggaccacaggcgtgcactaccacacccagctactgttaaaatttttttttgtagagacagggtcttgctctgttgcccaggctggtctttaactcctggctcgctcaagtgattctccctcctcagcctcccaaagaaccgagattacaggcatggatcactgagcccggcctcattttgtttctataaacagggataacaggagtactcatgtcttgagggttttgtgaggctggagcacagtgggcctcactcagtccactttgatgtgtgtctcttatcccctgttcttctcacctccagtagcctcctccatgggcggatccagccctgcccaccccaacgctgtgagtggatggcgtgtggctcacctgggcaccaggcgttgaagagcaaaatgaagtggcccagcacaaagctggatccctggtagccagtggaggcctccaggctgaggcgatacaggccgatgggggcgttggccggggtggtgagctgcagcgagagggtgcagtcttgctggtccaccacggtggctgtccagtcaccctcctccacagcatctcttagtggaaaacgggccttggtcccggcctcctggctaggggctgggcctgtggagggagaagcagtagccgtgagctaggggtagcagggctggcagggcagggcacctacgtggggtcccccagcttgggctccaggcctagttctgccactaaccactgaaataagtttggcaagaagtttgtctccctgagcctcagtttcctcatctgtaaaggggggctcagaaccccagccttttagggtggttttgtgggaatgcataaaaagccacaggcatacagcatgtcctcaactaaagagtcctcctgagagaggggccatgtggcccagagccaaggctcagttccactgctctgcaatgatgtgactcgggacaagcccatccctctctctgggatcacctggccccatttgtgtagcatagacaaggattaggcaacatgccctagggccctcctttcctgcctacatcctctacctgctagcgtcccgctttttctctcagagaaggaagcccagacgctgagcaggaagggacctcggtcctctgagagccccttgctgtaggccagcggaggatgctggctggcccacacagcctcaaggtgtctgtctccccaggccccccatctgctgtcccccacatctccataggcagttccgagatgctggtcataacgacccctcaccttcctacagccttttacacttcatgaagcacctgcttcctttgagaccccttgcccaggtgagaaaactgaggctcagagcaaagcggtctcccaaggatatcctaggagtttgtggcaaaggtcgcatctgaagtgggtctttagctctcagttgtcttctacggtgcctcttcttcccaaagaggacactccccagccgggttctcaaaggcacagtgatgggcacactctcaaagcagctgcttttccaggtggaggggagggcccgcccccacaggcaggtctgagtcatgggcagggcgaggaggggctggtcactttctggacatgggtggtggagagaagacagaggacgttctctgcctggctgggcgggtgcccaggaaagtttatttttattcttccatctccctccttgcagctctgcccacccaccgtggacattattggggcctgctcacccaggggctccctcccagcccccagccccctcctccctgccagccagccccacccacacccagctcaaatgtaaccatgaactaacaggcatgacacaggcctctcaggccctgtccaagtgccaggggccgactggaagcctttgaatgctccctgacttccagagctggcatttggggaggagccatgcaggcctggggtcccagacccaccctacgtctggctccctgactctgcccctgagcactgtgtgacctgggccacatcaccaggcctctctgatctgctttcttatccaagaagaaaacaggcttaggccacatgcctgggagagtccaatctcaggttcgaaactggctctctgaacttcgacaagttacttagcttctctatgccacagttttctcatctgtaaaatgaggccagtagcagtacctccctataaggttgttgtgaagcttaaagaggacaggcatacaaagcatcccacaaggcacctggtgtatagtaagtgctcaggaaacaatagttagtcttgttcagttttcatgaacgcctcctggctctgtttagagggttccgtgagagagttcatagaaagcattttgaacagtgaccagctcacagtaatcatgcaggaaatgtgagctatcgtcagtgttattaaaaggggccattaaaagtctgaattctcaggccaaatagcagatcgtgaggactggagtggaatgtagaaattgtctagttcgattgaagaacttcacagatttggaaactgaggttgagaggggtggtgctggggtgaccaagcatcacagtttgctcaggacagcctcagtttacgcctgtggtcccatcataattcttaagggtgctctttccaatctcagaaatgtccctgctcggaggatcaatgatctggtctctgtggcaacaggcctgggccagatcccatcatcactgtcgctgttgacatgtcacccttggggacaagtcaggaaacgcatttccctttctctctatcttggggcagccatgcacacacactcacacacccctttcttcccagatcctgggggaacaggagaaggacaggctgtcccacggtccacccgctgctcacgtaagctgacttcacaaattccttggctgcggttctacaccatcctctttgtgagaccagaggcaccatgagggccactctgggcccaaatgaccacagggagcctgggggtcctggccactatcccagaccatggtggccgggctgggatggggtgggtgggcaggaccttccagagtaaagccttctatcagcctcataagggttcccttcactcctccaggctgacttcactcccattgtgactgccacaccccctcaaaccccgaccccaccttggagggaactttatccctctgacaaggatggcatttgtctagtgtggcctggaccccataacggagtctgtcgggtctcaaactgtctgggtgaaaacacacaacatctaagaatgtgtggggtcaggccacatgctccattcgctgagtgaccttagccagctctcctgcttctctgggcctcagtttcccatcacaagctacaatgttcccacacaggagcagagtcagctggccaggccttgagccgggcgctgacccaggccaggcctggagttgggggagggcctggtttcctggtattgtccctcaggcttctccgggccccgggaatttcttggttgcttggacagggaagctgtgtgcactctgtactcagagatctgggctcttccgtggctgcctacaggggctgcggaagtgaccggggcaggttggttatggtttgagataagttggtggagactggaggacagagattagcttgctgaggtgggaaggtcagcagcagcccttcacccaaccccaaactcagggccctaattacctaacactacgctgcccagacaattggagaaggagaaataagaaaggggacatctggagtgaaagaagaggaaagaaggcagccttatcctcagcgaacgaacgcaggagcagaaaagcaaatcccccatgttctcacttataagtgggagagaaatgacgagaacatatggacgcatagagggaaacaacacacactggggcctccttgagggtggagggtgagaggagggagaggagcagaaaaaataacgcttgggtactagacttagcacctgggtgacaaaataatcggtaccacaaacccccgtgacacgagtttacctatataacaaacctgcacgtgtacccatgaacctaaaataaaagttttaaaaaagaaagaaagaaagaaagaaaaataaataaaaaagaaagtagaaatcacaggctgcccaagccagcagctcatctaccattccatttcacagaggaacacactgagccctggcaggcacttgtgataaatgcgcctgctgcagggacatagggatgaaaagcctcactctgcagtcggggtttgaagccttctgtgtccctgactcactgtgtgactgaccttcctgagccagtgacttgacctttctgagcctcagctttcccatctgcaaaatggagtcctttataacttctaagctgcgaggattcaagacaagcatgcgttcagtgggtgccccacagatgttgtgattttcactatcacaagtctgactcttctcaggccaccagacccagcccttaactgccatgtaccctaacttttcacttcgtaaagggggaaactgagactggagggtcagagacttgctgggggctccttggctctgttagcaagagaactttgggggccagtgtgcttgtgggggagcccctgggcagtgggtgtgtctccaccaggagggcaggggcagggaggagaaggatggaggagctatccgaggctaggctgcagtccccatgataagccttatcaacagccttctagttcaatgcaggcctcagccaaggaatgcttgctgccatctctgccctcagagacttcagaaagagctggcctttcccaacccgagtcctagccaggtggcccctcactgacctcaagggaatggctgccaccagaaaccagacccactgatttggcatttgaggccattttcccaggaatggccaacaaagaaaattgcgcatcacgcatctggggatgagacgcctggggacttggtgtccctttacctatccctggggccccagtacaaagataagtaacagctgcaaatatctgcaggccctcccccatagcagacacttaacaaccttccaatgtgagggctttcagatgatgaaacctcagaggctcagagaggttaagtaatttgcctaaggtcacacagcaggtaggcagcccagcctgcgctagaatcctagtctttctgtccagccccggagattgaggcagcctcctaatgcttggagaatgaactgctgggacccagaactgcccacatggaaggctgaagctagctgggctttttctctgccacccaggcctgatttgggcctgatcccagtgcctggctgggttgcgtggatttcaggcagcagagagattagaaagttgttttgatatgggaaagggcagacaggatctttttcttttttcttttaaggtggtgtcttgctatgttgtccaggctggattcaaagtcctaggctcaaatgatcctctcacctcagcctcccaaatagctgggattacagacatgtaccaccatgcctggcttgtggataggaatttttttactacagacagggtttctccacgttggtcaggctggtcttgaactcccaacctcaggtgatccgccctcctcagcctcccaaagtgctgggattacaggtgtgagccaccacgcccagcctgtggatgggatcctgatcaactttcctggttgaaggctgacctgcaaccctggtgataataggctttcagaagctcagggttccagaggcacagacttgctcacaaagctggtggtctgccatgacatctccttcctttccgggcctcagttccctcatctctaaaatggggctgatgacaggtggcaatctcccagggaacaaagaaggtaaagttatttgtcctgttctctgtcagggttctggggcatgtcggggtggagaggaagtggtggtggtggtggtggtggtggagtggggttgcaggtactcaccggtcacgacactgaaggtgagactgtctacactggcctcgtagttgcggccctcaaagtgcagggtcagccagaagggctggccccgtcgcaccaccagcttctcccggcacaggtcggccgtgtggtggtctcggccattggtctccagctccagatcacacctctctaagaccagctctatggaaacagaaggagacgcatgagcctcgggggcatccttcagacctccagtgatgcacctgccctccctagacatgggggccttgtgccctcttactccccacaaagcacagccattgtttcgactgacctgtctccccagccctggtcacacgggggctaggtggggcccaatctccctaactcttttttttctttttaatttaattgagaaaaggtcttgctttgttgcccaggctggagtgcagtggtgtgatcatagctcactgtagccttgaattcctgggctcaagggatcgtcccaccccagcctcctgagtagctgagaggacaggcgtgcaccactaattttttcatttatcagtgagctgggactataggtatgtgcccagctaatttcttcatttttggttttgccatgttgcccaggctgctctcgaactcctgggccaagtgatggctcctgccttgacctaccaaagtgcaggtgcgagccacagtgcccagctttgcctaaatcttttaatcacaaggtcgtgaccccctgtggcacttcctagctgtgtgacctccagcagccatgggaccagcagtatctacctcccagggctggtgtgagcaagaaatgaattaatgcatgtaaaacacttagtacaatgtctgttgtgtaataaatactcaataaacacgagctattctattgctatcagagggttcttttggtttaagcaggggcagtatttggtacaggtcaattacatggcctttgcctttagatccaatgttcaatttacaggaaatacccagggctgaggaacaagttaaacacagaaccaggatgcagttgacaaacttcatatactgggaaattattgacaaagggtccggtttctttaataaatagattgcaagaaagaaaatgaaaaaaacattgaagagagaacctataaagagaaacttaaacccgttgtgatgtattgatctatttggatcttgatttcaaaaaagtattttaaaacatttattacatgtatgagacaactggaaatttaaatactgatggcataatggtgatatcaaagaatttttgttaatttgtttgtgttaaaaaaaagagagtccttatcctttaaaggcatatactgaaacattgacagatgacatgatgtgatgtctgagatgaaggtgcgcaggggcaggagacaccacggtggtcagtgctgggtgatgaggacataggaatttattaaacaattctgtctatttttgtgtatgttcaatattctccaaaacaaaacatttttaacatgataggtgctttggagacttccagaggtaggttttagttctgctgtgttgctgtgtgagcctggataagtgtctctccctctctgtgactcctcctctgaagtctcaaggggctgctgtgagtctagaagatgtgttgggaacccccttccccacggcccagcccaggacagaagcttgatacgtgaaagttccatttacagtttcagatggagcagaggaccagggcacggtcagggtgacagatgggtgggggtcttgggggaaaacaaatctcataaaccttggcaagctcaaggtcaggatggggaagcccttaaggtgggaggagtgggcaagacagactctgagtgtggagccactggacagcatgtggtccaagtgaggcccaggggcaggaatttgttcaaagtcacgccgcaagttggtccttgcagtgggagagcccaggtctcctgctcaccatcgactattccaaaaatgagatgcaaagtgccttgtatgtgaattatctcgacttaaatcccaaaacaactccgcttacatagatgctatcatgattcccattttgtagacaaagacaccaggtggctccaggtcccagagcaagtggctgctttgggattggaatccagagctgtaggattctgtaggattctgccctgggaaccacctcactacagctcagttttttctccagcccctcttatgaccaccccttcgccaccatgtcctgtgttgttctcaaacctgggggcagatagttctgcgccactgaagtatcagggatgtcggtccccgtgtaatcacaacagaagagacctcagtggccagaaggaaaaacttcctgctggcctattgcggcgaggaaatgtttttggaaacttcagacccagggagcttgagcaggaaagaggccattgttgttcccatggaagaccctggagatacggccagtccctgggctgtgggagctggggcattttctccatctgttgtccgaagaagggtttccagaaatcacgcccagctccaaagatgcaggtctagaattgtaggatttataggatttctgcacttagaaagggcctaggccttctaggccagtgagacctctgtcagaagtggccactgtgacatggggctggaggctcatcataactggcatctccaggatctcccagccccactgagccctgcttttgagcatgggggtgagaagatgcattgaggacaagcggccaccgaggcgacacatcacagtgtgttgggagctgggcccgagggaggcaggtggctgagatcacacagcagggtcaggtgggtccacagttcctgccacccattcctgctccacctgccccatgtccctgtcccacaccccttcctgggggttgcaatgggtgcagaagccatccccagatgaacttgacccaagagccagctgggattctgggtccagcagtgacatcctccattgtagaaatccctccagctgggacctacgagagtgctgcttgtgtgtggggagggagtcaggggcaccagtatgaaattagttaagcctctgttccactcctctcgttcctcacagatgcaccaaaggctggagcagaggaccagggcacggtcagggtgacagatgggtgggggtcttgggggaaaacaaatctcataaaccttgtcctataaaataaggacactgttgtccttattttataggtgagactcaacaattggccaaggtctagggttgcagaacgtgagggcgggaagaacaagcctgatttccgaaggctcctggataggatgccgaaagctcctctctggccgctggagccaaggactcagccaggcttggcttgcacaccaccggcgtggcatgcacaccacctggtcctggctggcaagaaccacccaaacctaagtgttctgaggccaggccagcaccccctgcacagctccaggcacacatcagagagccagcccccactgactgactgaggacacgtgccagtggtccgccaggacagtactttacagtttacaacaccccgtcgcgttccattgcctcacctgatccagggaggcaagggttaatggttatgcagtgtggatggggaaactgaggctccaagcagcattgagacgcctcctcacccagcccggtctgcctgttgctctccaaatcaggacttagggattcagctcccaccgggtcctgacccccaatgccccggggcccctgagtggcggctgcggtgactctgatactcaccctcggccatggtcgggcgggggcggtggctccttccactggcggcgagaccctccaagtgcgaccactggcggctggcactgccgaggcggagagcggcgctaacttatagcccgctttggggcgggccgggggcggggccccgcgggaaggcggcgacctgggaggccacccattgcccagtcccgggcccacgccgccagcgctggggctcacccaggggaccggagcccgagggagggacggcggccggacgagggcgccccctgggggagcggacagggacacacaactagcccaggatacagacacacctggacccacagactcagaccttggagaacagacacctggacacacacactcagatacagacacacgcagcaccctcatagaaacacacaacggaaccggggtgcacctggacacacagatgtggactcttaggtcagatctgggatcaagaacacctccccacccccaacacacacacacacacacacacacacacacgcacacactcacacacatactcagatatacatacacagagagcagacgcagacacaccaagacagggctgtggagatacacacacaaacacagatacactcccacagatacaccaaacacggctggccacgcagacacagtgacatggatacaaattcagattcgaatggcagacacacaccaggacatagatacagcctgacacagccaggtagccttgaccgcgagccacacacagctgtggacacagatgagcaggtgtccagaggcacctggcacacacacagacctcctagacaccaatgccactgtcagatgtggacgcaaaatcagagagggcacccacagacacacaaagatgtggctactcagaggtagacacacatgcaggcatggactcaggtacagacatgcagacacacctgcaaaaacagacacacccatgtcccttcctgtagcaaaacccagataatcctccgatctcacccatccttgtatctgtctaatcagccatccatctaatcagccatccatctacccatccatccactcacccatgcatcacctacccccccacctatccatccactcatcccttcatccatccctccctcggccttctcttccctccctccctcaatccatccatccactgagctttcttgaggccccactgtgtgccagaaaggagcaagactaactttccagggactcagcctaggacttctcgaacctggcaaccaggggtcctatctctcatcctggtatctctggtctcttggtctcctgtgcttccggatccactgtgagccctgagcgggaagggttcccggagagacagaggcccacggggcttccctggcactttttccaaaacaagctctacattccggagcaagctctacattccagaacaagctgtacattccggaacaagctctacatctattgatgaatttggaagatagaagtagcccccgtctccattcctaggtgacatatggctcagggaaaacaacccgtgttgcttcagtggatatttctccctgggtcaaacgggctctggctggagtctcagtgaacaaacccacaaagagtgttgggcccagctgacccgtaattgccccattttatagagattgttgcagaaactgctccctgcagctggtgaaagcttggaggaaagagcagcgtgaggagaatcacccgaccgagagggaagtcggtcaagaggccggggttcaagttcccactctgcccctgaccagctgtgtggccatgggcaggattttgcctcagtttcctcctctgcaaaatgggggaaagaatccctccctcacaggcctgagtaagactcaatctaaatgaccaagtttgggtgccttatacgtggtgagcatgcaataactggggccctgagatttggcatggaaatatcaagtatcccagcacctggctatttcgggacctcaaggagagacgggaggcatggggacagtcagttctgcagaacaaaggctgtgtttccacaggcgttagccctgccccagatgaaaggatgggtttggccttttctaccaggtattttttcctttaaaaccctcagcctgggagctccctagaagacagggagccacctaagtattttatttttttgagacagggtcccactctgtcacccagatcgtgtagtggtgtgatctttgctcactgcagcctccatccctcgggctcaagcgatcctcctgcctcagcttccctgagtagctgggactacaggagtgcgccaccatgcccagttaatatttctaatttttgtagagatggaggtctcactatgttgcccaggctggtctcaaactcctgagctctagtgatctgcacgcctcgacctcccaaagtgctgggattatagtcatgaaccactgtgcccagcccacgagagatttttaaactcttcttgaccacagtgtccagcatggtgcctggctcaccaccagcccccaaaagtgtttgatttgagaaatcatcaattctatcagcagcagcaccagctccattctgaacattgttattccctcttcctgcaggcctggacttagttcattacacagagtgggtatgtcacgcagctctgggtttaaattttggcctcctcactgtgtagccatgtccactacacagcaagtcacttaacctctgtgcctcagtttcctcatttgtaaaatgggggcagtattggtacccactccccagagtgtcatgaggactgagtgagctaattcatggagagtttgtacagcagcagccaaacagtcagccctcaatggatgctggctgtgagaagaatcccattagattattcctggatcccagcacagggcttagcacagaattccaggcctgtcccgcacccagccagctgcccccacttcctctcccacattccacagaactatggccacctgagtgacgcatggcgttgagcaaccccaggatgtggccagccggggtcaggactggcttctaggaagttggcagacagaggccagaacccaggcttggcccagagacctggattccagtcccagtgaccaggcacccttgcccctctctgggtttcagttttcccatttgttcaaagggactgggaaactgtgccctgtcttacctcaccggggctgtaaaggtttcaaaactcccctgagtcccagagagggtgatcatggcctcaagatccccagacactgcaatcagggccctttgtcatctattcaggggaagtgttgtgcaatgcttagagcaggagggctgtgaggtcactcttggctgtgtgactctggataagttactaggcctctctgagcttcagtttcctcctctataaaattggtatcgtaagagtccctgccactggggattagagatcatgtttctacagtgcttacaggtcacatagtaagtactcagtaaatgtcacctaagctttatgatgatgtcatcaagagtcaggaccctctccagaaaagggagagtccccgtgtgtgggtgaagcaggttgcagtcaatgtagcatatttatttggtgggtgttgctcagaaagactctctgtctcacaaataaatcttgttctcacagccactgatgcctagaatcccagcgttagagagattcagtcccttccacaaggattctcaagcctcaaggtggagacaaaggtgaatatttagaaactttggaataacccactaccagccagatattccatttaaacctcacagtatgattcttatcatttgttaaatgaggaaccctgggttcagagaggggaagtgcctcacccaaggccacacagtcaggaagtgggaaagcagggcctgtgctggctccgccaaggttcagaggtcagtcctgtctccccgtgccctgcagggcagtcctcaggggcctgggccatgtccagttctacagcttttagcaagtgaggcctccgaggactgcagcttgtgctcctaacacatggcatgtggtatacactggatgcttaataaatgtttatgacctgagggaggaatgagttacccacagctggagaaagaatagaaggaaggaaggaaacacagaaacaagattaaagttcagcaaggttggagaaactgcctaaggtcacacagcatgaccaggctctcgggccctggctcagctcagccactcctcaaggacaaggtgcctccaggccagagacagacgtagacagctgatgtgagagggagggagggcggggtgggcaggagtgtgccagggcatctggaggcttttctaccaactactgactaaccgggatgagcagtgtctggtgtgagggagcatagggagggtggggcaggctctcctgaggtgggatggggtggggcaggggtgttaggttgcggacttaaggaaaatgtcaggaggcaggtgtgacctttcaagccctttgagagaatggcctgtctggggcaggatctgggtctcccaggctgtggaggacagagaacagggcatctgtggagggagggaggattcttccagcgtgtccactttgcagatggagaaactgacctggttgtcttgtcctcagctctgactccacaatgtaccaccctccaggtgtagtgcatcccccttccaccgtccctgcagccggcacggggtcccagccccttgagcttgatgggccatgggtaggcacttttattcacttctctgaagcatcagtttctgtttctgtgaaagtgagaatcacatcccagacctcatgaggcactggaggccctgcagggctgacccagcttacccttcaatcgcatcttccacattcatcccttccagcctcaccaggcatggtacttgccctcaaatgagccctgcaaacacccacctctagggctttgctccagctgtgtcctctacccaggatggccttccctcttcacctatcgaagtttaacccaggctttacccatcctccggaaacccacccagagacttccttcttgctctattggccccacacccacaggacatagtcacagcgtaacttgtataagttctagtgtttgtgtatctctgtctccctccacccacctggctctcagtagctgctcaataaaggcttgttgaatgaattaatgaccgtaccaggggttctaaggaggagagagagacaacttgttcaagcccaagccaggttcttggggttggcccgggagctctgataggacttgtggtgccagttgcccctggtaggaccaggaatcggggtgaggcgctagggcctctcgcagcctttgctgtctgcaccagagatgaaagatctgggtctgacttaccctccaatcatatcttctacaatcccaggacaaccactgggagaaaaacaaaggacagacctggggatgtgtgggtagcagagtaggaatacccaccgctgggcctcagagggggcaacagcctttccccaggccacacagcaagtcagggcagagtcagggtggggttccaaacactatagaagtaagcagtggccctgtaccagccaggacgttgcatgaggtatgattccacaagactgttcaatttctatgggaacagataagtaaatatacatacagtacatacatataaacatacagaagaaggtttggaaaactccagtccaaattgctggcagtggtgggaggagatatgggggtctatgactgggggactggcagtggtaagttttgaaatttgagaaagctgtttttatgtaacttggaattgggtgttgcatttaacaaggagtgggaaggaagatgaggctcagatgctggaaccggcagtgagtccctgtggcaggggccacagctccaggctccaacttgccctcctcttattggctgtggcctcctcttctacaaaaaggactcaacacgacacgccatcctgctgggctcaaaggatgagatcagaagaaacgggagataaggaaaataagtcaattctattattgttattatgatgtggctccagttcctagcaatccagacacccgagggaacggggagttttaggatttttttggagaacagagttctggccatctctggcagcaagatttgcttttctcataggactcaaactgacaatccgattatcccttccctagcacacgaccctaacaaagatggtcatctgatatgacaactccaaaagatgaggagacattagggctcaggaaacactagaggtgggaggtgctgagagggtcagaaaaaccacacaagcaggaccggagctctgacattgacaacagatggcgtcatttggtgttgggataaacagtcctgctcattctgtgcagatagagcagggcaattgtcaatgattgccgtggtgacccagagccatcctatgagtagagagactttgtgacttgcacattaagcccacaagacacttttcactcccttctgggttcttctagcagtagcaaggttcaactacaaggacacgggcctgggttcaaatccagctctgccatcgactgtcctgtgtgatcttgaatgaatcacagcacatctccaagcctcagttgtcccctctgtgaaatgggggtgataaaaacagtgcctacattacaggatttttgtgaaggttatcaccattcttggcagacagtaagcattcaaataaaggtggttgattactcagcaataaaaaggaaagatggattgacacatgctacaacaaggatgaacttccaaaccatcatgctaagtgaacacagccagtcacgaaagaccacatatcgtctgattccatttatacaaaacacccacaataggcaaatgcatagatatggagggtacatcaggggttgtcaggagccaagggaagggagaaaggaagagggaggaatgaggagtaattgctaatgggtacagggtttcttttcgggagtaaagaaaacattctaaaattggatggtggtgatgtttgcacaaatccgcaaatagactaaaagccattgaattgtacacttaaatgcatgatttttatggtatgtgaaatatatctcaaaacgtggttttcaaaaatgtttgaaagatttaaaataaaaaagccaggaataaagctctgaaagtctttgcaaatattgtctcattctcaaataaaaaaaaaatctaagagaaactgcacatgtatgtgcccaaggagatgtctctaggaggggtctttacagcattgtctgttatggcaaaaacccatcacaacctaagtgcccagtagagggggttggataaagcagccatgcctggaaatattactcagcagttgaaagaaagaagagacagtctcctgtgtgtggacacgaaaagaattccaagtcataatgtagagcgaagaaagcacactgcaggacattgcatgaagtacgattccaccagactgttcaatttctatgggaacagatacagtacataaatgtaaacatacagaagaaggtttggaaaaatccactccaaattgctggcagggtgggaggggatatggggggccataaccaggggacagacggtagtaatgaaaggtgatttcagtattccctggaaggtgagaaaagtcttctgtgaagaaataatgttatctatcacttaggtaattaaagattaattttacaaaaaaaagaataacctgttttacatttagaattaagcttttattaaaaaaggagatactccaaaataaataaattctggcaaagtagatagaaaaaagtaaagtcgaagataaaggagaaagtgaatgtgccccccacaaagcccacaatcaacccctaaaatacttttgttaatattggcacagtcttgcagaaccaaacccaaaaacaagcacatgaataaataagaaattcaagatgagaattgaatcacatctaagaaacgtaattttgaaggctacaccaagtttctgtttacttcacaaactgtttatgtctcaaagtgctcctgcagcaccaccctggaaagtgcttgaaaatcttctattttgtgattttgtgtcaatgaaggttcagagaggtgcagtgtattgcccaaggtcacacagctcagaaagagtgaagcaggggtgccgagaagtgcttgctggaatatcatgcaaggggaattaagcctgcgtcgtgggtgcctggccaagctcccatggccatgtggggctgctggagacacggagggatgaagcaccagcatactacagcattcccctacatccctcccacaaggctgagtcattggctgtgtctgcctggcacacccagttcagtcaataagagtcaaacacactttcattcatggaaataaatgaccctttgggggcagtggcggagctcgtttgactaaattgaacacaagtttggctaaactgaccacttgtttctcccgcctgtctgatgagctgcttgagtgacgtctggctgaactgagtgcttgtaggtctgaaggaacattcagcttgacccagttagtttaaatccctgtcttcgcacctgcagaggggctgctgtcacctcgtgccagcatcacaggagacgggaggtttggcctcagtcctggaagggcagggctcagtctccagaataataaaccccacacacatgtacaggcatctctagttggtggtgtcctctttgtaggcacagcgagtcctttgttttgcttctggctgactgctcttttctataggtttgttgatactgtcaaactgtcaatcaagtggccccacccaactctagttaaggacaggtctgggacccaaactcagcctatcagaagctcttctgggactttgactcttacaactctgacacaagttctaaataatggttgaagtttgctggttcatgtctagaactacgtcagctctcgtcttttctaaagttgggctttttagctgtttatttgattttttaaaagtcatatttatggagttaaaatttacatacaatacaattcacccgtgttgtattacatacaatacaattcacccatgttgtattacatacagtgcaattctcccatatcatgcaatacagttctgtgactcgacaaacatatatagtcgtgttactacaccacaatcatgatatagaacatttccatcaccccccaaattcccctcatgcccttttgcaggcaattctctccccctaccctccgcccctggcaactactgatctggttactgcgccgatggttttgtctttccagaatgtcataggcatgaaatcacgcagtatacagccttttgtgtctggcttccttcgcttaccgtaatgtatttgattcatccctgttgttgcaggtatcagcggttcattcctttttattactgagtactattctgtcgcatgaatataccacaatttatttgtacattaaccagttgaaggaccctggggttgttctaggtgattatgaatggagctgccatgcacatagaggtaccgctcattgtgtggacagatgtcttcacttctcttgggcaaatacctgtgagccatccccatatccttccagctaattttttggttgtggttaagctgcactgagcctcttttcattcatgcaacccaaaccaggtttgggtcccagacctgcccttaactagagttgggtgggaccacttgattgacagtttgacagtatcaacaaacctatggaaaagaatgggacagtgacatctccctcgtctaattctcccagtgactctatggggtttatggattattgacctcattttaccaaggaaacggaggcttggagagcctaaataacctgccccagaccacacatcaggtactcaaatctaaatcaaagtcacaaaggaagccacagccacctttctaatttcctagtcaccttggtgggaggggaactttcacaaggaaggttctaacaagtttttattgactgacgggtgatcgaataaatgcctcactcaaaggagtttattctctgggcctcagtttcccatttgtgaaatgacatgtttggaccaagtaaagaatttctgatgcccctagcgtccgtgatgctcacatgcggtggctgtgaaagtggagtcatcagggccttcttttcggatgaagaattccagcaaaaaggagctggtgggggagggggagggggagcccagcacttactccccaatcagttcccacaggcggcctcctgagcttgtgcccagggctggttgacccctagaagagcaatttgcacttcctgcctttctggcctaaaaaacgaaaagaaaagaaaaagcccctgtcaccttggattaacatcaccccctctgctgagaatcttctaaggggtgcagccccctctcttcaccaatattttcagaatgtccagttttctaaacaagacttgacagggtggtttcttttttaagctttttaaaataaaataaatcaccctgtgcatgcacgatcctggaacctccaattagattaaccctatggtttcctaagcggcagccagctgtgggcacagagaggtaggaggaaggaagcgacgggggcctcacctatgagccggactcacctgcttcccaggtcacctcccttcccacggctcacaggacagtacccaggcccatcaggaagctcagaggcagaatgactgagggtttcaaggcccgacagctcctagctgtacaacctactgcaaatttcttcatgtctctgacctcagtttccacaccctgataatgggggtaacgagaggaccaagctcacagagtagttaagaataaatgagttattgcagggtttagtgtttggcgcagggaaaagctgcagatgttgactgtttttagtactcttataattacttctatgggctttgaggacctcgattccaactgcccccctgcaagtcagctctgagggtaggtgagagagcatggtcattgttcacctcctgtgtgccaggctctgtgtgaagaagctttatgcatgtgattgccctccacctcctttttttttcttttcttttcttttttttttttttttgagatggagacttttgctctatcgcccaggctggagtgcagtggcttgatctcagctcactgcaacctccacctcctggattcaagcaattctcctgcctcagcctcctgagtagctgagattacaggcatgagccaccatgcccggctaatttttgtatttttcatagagatggggtttcaccatgttggccaggctgggttcgaactcctgacctcaggtgatctgcccgccttggcctcccaaagtgctaggattacagacgtgagccacagcgcctggctgtgattgccttttgattgtttgtttgttctcagccgcatctggccacacaaggaccgtaagttaatccttctctcaggtagttctatgtctagatgatgaatggctccatcacccaacttccagatgtaaagagtaggggtcagaggccgggtgcggtggctcacacctgtaatcccagcactttgggaggccgaggcgggcagatcacgagctcaggagatcaagaccatcctggctaacacggtgaaattccacctctaccaaaaatacaaaaaattagccgagtatggtggcggatgcctgtggtctcagctactcgggaggctgaggcaggagaatggcatgaacccgggaggtggagcttgcagtgagccgagactgcactactgcactccagtctgggcaacagaacgagactccatctcaaaaaaaaaaaaaaaagagtaggggtcagggagagcaaggagcatgcctctggtcactgggggaacttcttgagctggggtgggccctgtgatctgtctgggtggattcatactggatctgatcccttccctgtgggtcctggtcccatgctctggcacagactacagatggggaaagtgaggcacttgcccaggaccagatctgcccaggtgccaagcccgcactttttgcaaaataccagcattagctagggagggagtaaggatgagaagggcagcaggaggaggtgggtggtattgttgtccaggtgggagaggacggaggctgggctgggaggtgggaggaccctgctcacaccccctttgtgcacactgtttcttgtgcttttttatccttcacagcttaaccccaggatcacgtctcgacgacagccgcctcatcaacggccgcttggccatcatttgccaagggcttactgagtgcaggggccctgaaatgtacatgcatcgtcttcagtctactcaccagccctgactttaaatgccatctatgtgctgaaggctcccacatttgcatcttcagtcctgtcctcactcttaaatcccaggtccaggtttccaatcgcctcctcaaaattcctgctgtgccccacccgctattcactcccccgcagtatccccatctcggtggaagcaacaccaccattccctatgctcagtccccagggtcagccttgactcctctctctcagatcccacctcaatttgtcaggaaatcctggttgccctgcctttaaaatgtctctagaatctggccacttctcacaacctctgcctctgccaccatcattctggtgcaaaccaccagtttctttcacctggactagggctccctgttttcccccttgctccccacttccaatctgtattccacacaacagccaaaggaatctctttaaaacttaagtcagttcctgccactcctctgctcaagagcctgcagtaaccccctgcttcactctgattaaagccaaagttctcatcaggtccccaagacctccaccatctgatcccgttgttctcggactttctctctgaccactccctgctcacttggccccggcacgctggcctccctgccattccttcagcttgccaggcgtgtcctctgtttagaacttttgcactggtcgttccctcggcctggagtgctgttctttgacttggtggcctgggtatagtgtggcgcctgagaagtctgtgctgcatccacatggcaggctctggagagtgtggagggaacttggtgatgaagggacagagatttggcccacacacattagatgctgtgtgaccctggagattgcttaactgtgtctcaatttcctctttagccaaatgggctctaagtgagctgatgatgttactggggtccctgactcattgtagcttgtggggagaaagtggtcatgccctcagaaactgtctggtcaaccctgccattgtagagctgggaacattgaggccagagaggagtcccattgtccaaagacccataaacagttagagagagagctatggggtttttgaaagattaattgacttattgaataatttctttattgaacatttatcgagttcctactgtaggcttaactgtgagtaagacagtttctgctggcaaggaactctcagcttagtggacaaaacagatggcaaggtgctcactatgcaaatagtaattcctggcctggtgtgatggctaacccgggtaatcccaacactttgggaggccaagttgggtagatcacttgagcccgagagttcaaaaccagcttgggcaacacagtgagacttcgtctttacaaaaataaaaataaaatattagccaggcatggtggcacatgcctgtaaacctagctacttaagggaggctgaagcaggaggattgcttgagcctaggaagctgagactgcagtgtgccatgatcatgccattgcataccagtctgggcaacagagtgagaccctgtctcaaaacaataacaacaacaacaacaacaacaaaacaagaacaacaacaattaattttcacaacctgtgttcagggtcgtagcggaagaaggcttgggacctgagagacccccagataaaaaagggattatctctgtgtggcagatcaggacagcctccatggagaaggtgacacaatgtgggttttgcagtatgaatatgaattatgcagataaggcaaagaggagcatttcacactgatagattttggatgttgtctgctctaagtctcatgtcgaattgtaatccccagtgttgaaggtggggcctggtgggaggtgattgggtcatgaaaagtggatttttctgcagccataaaaaagagtgagttcatgtcctttgtagggatgtggatgaaactggaaaccatcatcctcagcaaactaacacaggaacagaaaaccaaacaccgcatgttctcactcataagtgggagttgaacgatgagaacacatggacacggggaggggaacatcacaccctggggcctgttgaggggtggggagaaaggggaggaagagcattaggacaaatacctaaggcatgcggggctcaaaacctagatgatgggttgataggtgcagcaaaccaccatgacacacgtatacctatgtaacaaacctgcacgttcagcacatgtatcctggaacttcgagtaaaattgtttaaaacagtggatttctcatgagtggtttagcctcatagccccggcactgtcctcatgatagtgagtgagttctaacgggatccggctgtttaaaggtgtgcggcatcttccccctctctctcttgcacctgctcccactatgtgatatacctgctcccacttcaccttcaccttctaccatgagtaaaagctccctgaggcctccctagaagccaagtggatgtcagcaccacgcttgtatggcctgcagaaccctgagccaattaaacctcttttctttataaattacccagcttcagacattcctttatagcaacgtaagaacagcctaacagacatgcaaacagacttgtctgtgcacacaggggtaaagttacagaagtgaggaatggtgtagagaattcacaggaagaaggagtcgaacggtatggctggggttttgggggtacttggaaggaatgtcaaggctggagtggttagtggggctcggacaacaaacgtctctgtctaccaggctcagtttaggacacgggaagccatgggaaagtttaaagcagggaagtggcatagtcaaggctgcattctgggaagatagtgctggaattgtttatcatggaattttagatttttttttttttttttttttttgaggcagagtcttgctctattgcccaggctggagtgcaatggtgcaatctcggctcactgcaacctctgcctcctaggttcgagccattctccttcctcagcctcctgagtagctgggactacaggtctgcgccaccacgcccagccaattattttgtatttttagtacatttcaccatattggccaggctggtcttgaactcctgacctcatgtgatccacccaccttgacctcccaaagtgctgggattacaggtgtgagccaccatgcctggccagaattttagatcttgaatttagtgattatcatcatccctgggccctttttaaaagaagagcaaattgaggccagaaagggaaatggcacccaccgttcatcagggacagaagcatttgctcccaccttggtctgtgtaggtggggctgagcctgaggctggagtatgtttgcagatcctgtggggtgagctgttcccagtgggaccagttcccagttctctgtgacatccctctctctgctcctccccttcggacctgccctgcaggctccaaatatcgtggttgatatggaaactctcctgttacacattccttttccagttgtgtgaccctggcagtgtccttcctctctggagcttcggtttccccatctgtctaatgggagtgataaatggagtgatggctggcactgattatcaagcactcgggcatctcctccaattctcccaaaggccccaaggaagaagagggtctgccattatcagtgccctgtccaccggcagaaagtgtgaggcagagctcgttgtggaaagcaaggctcataatttacctcactaacctgtgtggttctggatggcacagagccaactgggactctcgtttttctcattctggtccctactcccttcttcgtgtgacctaagaccttaacagctgtgtaagtgaaagtggaacaaacaaagcaccccctgagagacttctcatgataccaaggggcagccccagaggacagaccaacgctcctctcaatccctaaaaagcctctgcctgactgagcacagctgggagcagtgatgtcaggcctggcttggtagatcaaagcagcaatggccccagggcctgatgggtgcacgggaggggcagggctgagtagttgatctagctcttaaagatccttgagcttgaagtcaccctgggacagcctcagcaagcgctcaaggctggcacttgggaaaggtcacatggctttgatgcttggccagttttagatggggagaagcactactatgttagagtctagattatcttagaaacccaactctacccaggagttcctgaagaaagaccctgaaatctctcaggcagcaaacggaggtcaacttggtcaccaagcgtggcttggtgcccactctggacccagctctgtgccaggccctgggggagatgaagaaatgaggcaggcctgttttctttctgtggcttcaacagaacatctgtggtttccccctaattaatcgtaatacatgctcactgtttaaaatttataaaatacagaacagccaaaagatgaaagttaaagtcaatccaagtatcaccaacaaagagaacaactgttaacattttgttttatcttgttcagtgttgctatatcatatttaggtgtatgtgtagatacaaactcacataattatgtatttagtttctaaaaatggaatcactcaattgtccaggaaatgtttgttgaacattcaccctgtgccaagcatgtggcaggcagcggaccagaggatgcgattcctactgtcatgaaagttgcctctaagcactcttttgtcccttgccttttttcactgtgtgcctaacattttcaaatcacatgtatttctacaacatatttattggctatcaagaatttcatcacatggctgaatttgtcaagccccacttttcttgcgcatttaggttgcttcccattttttcactactgcaaacagtgccatccctgtagccttgggctcataaggtggattggcttattccatatcaatttcaaccccctcttatatgccttcctcaactgcaggggctggaagggtgaagattgcatttcccaactcccttgcagctagggtttagagaccaattaagtagttcccattaaatgcatttgtgtgaggttttgaaggcaaaagtaagagagaggtcatcttcctccttttgctggttgtgaaggcattgagacctcccacaggtgtgtctacagtgcctggtcaccaactcttgggtgttgagaagtggtgatggggcatcagccgcatctgatggctggagtgaagctaaggtgacaaactcctgaagacaatagttcccaagcttctgggtggtggcagaggcagcagctttcctgggcaggccagtttagcggtgacattctaagaatcgctcctagaagcccaggtcccttgcttcagaattttccatgattttgcaagaacacaacttctcgcattaaatctccctatgttgaaagtagtgaatgtggtttctgtgtcctgcacctgcactctgggtgatataagctacatctttgagcctgttggcaactatttccttagactaaatctctaccatggaacttataagtcaagaattcatttttttttgtttatttaaatagttttactgagacataatgaacataccatgtttaaagtgtacaatttgacgtttagtgtattcacaaagttgtagatctatcatcatcatctaattttggaacatttcttcaccccaaaaagaaatttcatgcccattaggagtcaattccttacctctctccccactcctaggcaaccgtgaacctatttcctatctttataggtttacttattctgggcatttcatataaatcaaattatacaatatgttatcttttgtggctgccttctttcacttagcataatgttttcaaggttcatccatgtcgtggcacatatcagaattgtatttctttttattactggataatgttctgttatatgaatataccgcattttatttatccattcatcagctgatagacattcgggtactctccacttttattttatttttagagacagggtcttgttctgtagcccaggctgcagtgcagtggcacaatcacagctcactgcagtctcaacctcctgggctcaagcgatcctccccccttagcctcctgagtagctgggactacagatgcgtgctaccacacttggctaattttatcttattttattttattgtagagacaaggtctcgctatgttgcctaacctgatctcaaactcctgggctgaagcgatcctcctgcctcagcctcccaaagtgttaggattacagtcgtgggctactgagcctggcttgtttccacttttaaactcttgtgaataatgatactgtgaacatttgtgtacgtgtttttgtgcggatgtatattttaatttctcttggggaggcttgtgtcagtgaaagttggggtgttggtcgggggccgagcaggctgtagtggtacttgggaaggagaaggaaggggaatggaggcttactgtaacatccaaaaagcatgatgataaaattgcaattggattgtgcctgcatttcttctggaaaacaagacttgaatgcaaagacagcaccaaacaaatctagaatgacgagcctcaacatgtagtctaacaagatggtttcaggcccaagtgatgtaactggtggaatttggaggaagaatccttcctttgaagtttttctatattgttgtgctgagaacgcttcatggtattcagtcaactggagcgtgtacgtggagttttgatattgccgcctgcctttggccagcagaacagtttactcctccaagagctcactcaggtgaaaagtcaggaatttactcagacattctgacacatgtgtcatcaatcttggcgtttcctccccctgacattgatttattacagtctctggctccgtctatgtgtggatggaagatgtctgggaaagtcagagaagcctgttacgagtttggtctccaaatccaaggattgatatttttgccggattggactacttctgtttgaaaaagaggccgggcgtggtggctcatgcctgtaatcccagcactttgggaggccgaggcgggtggatcacctgaggtcaggagttcgagaccagcctggccaacatggtgaaaccccgtctttattaaaaatacaaaaaaattagctggacctggtggcacatgcctgtagtcaatcccagacactcaggaggctgaagtatgagaattgcttgaatccaggaggcggaggatgcagtgagccaaggtcacaccactgcactacagcctgggtgacagagtgagactccatatcaatacaaaaaaaaaaaaaaacgaaagaaaaaaaaaaagaaaagggtggtggtgggagttattgttggttatctcctggtacttgtcttcctcttcttctctaataaaggaatttttagcagagaaaaaaacatttctcttggatctatatacctagaagtggaattgctggatcacatggtaactcaatgtttaactttttcagggactaccgaaccgccttccaaagttgttgcacgatttcacattcccactagcaatgtatgaatttccaattgttccatatcctcgccaaaacttaatgttgtctctcattttcgttagagccagtctagtgggtatgaagtcatatttcatggtttagatagacatttccctaatgactgaagatgctgaacatcttttcatgtgcttactggccatttgcatgtcttctttggagaaatatctcttcaaatcctttgcccatttttaggttatttgacttttatttatttatttagagacagagtctcactctgttgcccaggctggagtgcagtggcacaccctcggctcactgcaacttccacctcccgagttcaggtgattctcatgcctcagcctacccagtagctgggactacaggtgccagccaccatgcccagctaatttttgtatttttggtagagatggggtttcaccatgttggccaggttggtctcaaactcctgacctcaagtgatccacctgccttggcctcccaaagtgctgggattacaggtgtaagccactgcacctggccccttacattttattatgtatatgagttgcaaagcttccttatatactctggatacaaatcccttaataagatatgtgattttcctttttttttagtttatgtgggttgtctttccactttcttgatgatattgtttgcagcagaaaactttttaattgtaatgaagttcagtctttttttctttagccatttgtgcctttaatgttatatataagaagacttagattaacccaaggtcatgaaagtttaatcctgtgtttttttctaagagttttatacttttaacttacatttaggtctatgatccattttgagttgatttttgtgtatggtgtggatgtgaatatctagttgtcctagcaccatttgttgaaagactcttctttcccctgttgaatgaatggtcttggtaccattgttgaaaggcaattggccataagcataaaggtttatctctggatgctcaattttattcccttaatctatatgtctatccttaggctggtaccaaactgtcttgattacctgagcattgtagttagtttatttggggtctcttgcaattccatatgaattttaggatcatcttgtcaatttctgcaaaaaaaaaaaaaaaaaaaaaaaaaaaaccagctggaattttgacagagattgcattgaacctttagacgaattccaagagtattgccatcttaataatattaagtcctttgatccatgaacatggagtctgcctccatttatttagatctttcatttctttcaacaatatttggtagttttatgtatacaagtcttgtataccttttgttaaatttatgcttaagaatttattcttgttgatgctattgtaaattaaattgttttcttaatttgattttagattgttcactgctggtgtatagaaatataattgctttttatgtattgattttacatacaggttgcacaaccttgctgaatttgtttattagttttagtaattttctagttgattccttaccattttcttgtatataaaagattatatcatctgcaaatatggttttatttctttcccatctggatgtcttttatttcatattcttaactaattgctctggttagaacctccagtacgatgttgaatagaagtggcaagaatgggcatcgctgtcttgttcctgatctttgggagggaaacatctaatcttttgccaggaagtatgatgttagccgtaggtttttcatcgatgccctttatcaggttaagggcacctatttttttgaaggcttttgttttgttgtgtgaatcatgcttctttgagataccagtcattctttcttggctactcccttggccacataattcccatgacaagctgggtcactacaaaggaatagccttcagaaatgaccaaaattctccaggtaatgaaaaatcagcagaaagggggaggaggggtggaggagggaggggggaggacgggggaacacacatcctcttccttgatccaattacaatactcctgcttgtgcaaccaaatacagaactggccctttggtgactgtaattaaaatgtgggtccctggctgggcacagtggctcacgcctgtaatccccagcactttgggaggctgaggcgcacagatcacctgagatcaggagttcaagaccagcctggccaacatggcaaaaccctgtctctactaaaaacacaaaaaaattagctgggtgtggcaggatgcgcctgtagtcccagctactcaggaggctgagataggagaattgcttgaagccgggaggcagatcgcgccactgcactccagactgggagacagaacgagactccatctcaaaaaaaaaaatgtgggtccctttatgagctttcaactaaattagtggttctcaaccctcagtccaaagcaccccccactttaatcactttttaattgaggtatagcattgtgacagttgattctatgtgtcaacttggctaggccaccatctttttaaagatgaaattagtatttaaatcagccgaattgagtaaagcagatcacgaaggtaaagcagcagacagagtgaagcaatctgattaccgtgtgggtgggccttggtcaatccattaaaagccttcataggaaaggactgagttctgccagcaggcggccttcagacttgaactgcaatgtcagctcttttctgggtctccggcctgccagcctagcctgcagatttgggacttgccagcctccagtcatgtaagccaattccttaaaataaaataaatctctcccctcttctctgctctctctgtctctctctctgtctctctctacacacatacacacacacacacacacacacacacacacacccctattggttctgttttctgtttctctggagaaccctaatacgagcctatatacagaagagtgcacatcactgtacaacttgatacatttttacaaactgaacccatcagatcacgaaacaggaacatgaccatcaccccggaagttccccttgtgcttccatccaccctccatcccccacaggtaatcactgtcctgccttttaatagcatggatgagttgtgctgattctagaactttctataagtggtgtcactcagcacgcactcttttgtggctggcttctctcactcaaccttatgctcgtgtgagacccatctgtactgccaagtgtagttgtgagtgactgattcttccttctgtgggtgctccattgtgtggctcacctcagtttatgcatccattcagcttcgagatattcaagatattcatgttgtttccagtttggaactattacaaatggtgctgctgtaaacattcttgcacatatctttttttttttttttttttcagacagggtctcactctgtcacccaggctggagtggtgtgccaccatcagggctcactgcagcctctacctccctaggctccagcgatcctcccacctcagcctcccaggtagctgggactacaggtgcgtgccactatacctggctaatttttgtattttttggtagagacgaggttttttcacgttgcccaggctggtctcaaactcctgggctcaagcaatctaccacctcggcctccaaaagtgttggggttacagccatgagcccctgcacctggccacatatcttttgatgaacacgtgaacacattgtagctgggtttaaacccacaagtgtgattacccaagccccctttctctatcaaacattttaagctttctttcatttaaatgttcgaaatgaaacttatggatgataatgcacacacacatcaatgcaatgtctctaatataaaggagacataaaatggaagtgacttatgataaaataatgtgtatttcaatatattcttgggcacaacgaccccagaaggcataatgaagatgccagaaccctgtatgcccataattagtaagtctggattccagagatgtaagtagaccagacgccatggcacaaaagaagtcagaaaaatgaaatggcaggaggtgagggtgaagattaaaatctgctgtttgggcaagacataacagacttgacttatttgtatgtgataacagaaagaaagactttaattggagtaaggagagtaccccaagacacgctgccgcctgtcagtgggggaaataaggaaggtgagcctcagtgtgcagtgacaaagaattcccattttatgacacaggccacggtagctgtgtggtcacccagaaaatgcatcttccttgaaaatcccatctgcaatggaggggtgcattctgccttcagatccctcatgaggcagaggcgacatgcagatagatcatgaaagcagctttaatccaaaatgctgtgaaggagccatgtggggcacctatggaaacaatttctgagcaagattggaaaacaaatggtgaccccatcatctcaatgtatccttttcacaacatagattcaaaacgatcatccttatggtcattttgtgagattcagtgagatttcttgcatctctactaatttactaatacttgtctctaagattgtaaaaaagagtcacacatctcctctattataagtatctgcagttggtttcactgtttttgctgtaactgcattcatgccctggaacccttttcctctagatatgtagctggcaatggtttaacacattgactagacaggctgtgaggaatgagaatgttattcaataattgactcactgtcattgcatttatgtgtccttgtcaataacaacctttttctaagttattgagtttttcacgtaacttcttgtagaaacctttcagtactgcaatgtactaaacgctgacctatatgtagttgtcataggtttgcatctggcagacgttcgaaagctatgaaggatgttgggcaaatttctgttgtgtggggctgtcccatccattgtggggtgcccagcattcccgattcttgccctgtaaatgtcactagagcccccagtgcaaaaacgaccccccatgaattatgtaaaatgtcccctagagaactactgatttaaacccactccatctcaatcttaaccttttcaccccacactaagttgttggcatttgagtccaaggtcgggggttggtagtgactcttattatattgtttttcatttctttttagagacaggatcttgctttgtcacctgggttggagtgcagtggcacattcagagctcactgcagcctcgatcactggggctcaagcgatcctcccacctcagcctcctgagtagctaggtctacgggtgcgtgccaacacgcccagctaaattttttggtgtgttttttgtagagacagggtgtctctatgttgcccagggttgtcttaagcttctggccttaagacaaggccagaagtggtgatcctccctcctcagcctcccaaattgctgggattacaggcacaagccactgtgcccagccattcttattatattttattttcttatattcagcccatcggtcctgctggtcagggtctttggacatcctggttctgatatccaatgccttattgcccctcctagctgtgctgtactgggccatcttcccaccttaaaatgatttatagacatgttgaacaggatggggctggggacagagccccgtgacattccactgtggacctttgtcaacggcaatagcaagctgatcgttgatatcttctggcttctggttatcatagggatacagcccagcttccatcaatttgttcttccagtgcctaaatgttagaactccatgcaggtggaaagagtgtatctcagaagacagaagtgacttgcccaggctcactcagcaagtcagagtcagagcaggggcaaagtaagctgcctgaggctgacccactccagggcttaggggatttaaattcctctgatggctactcagcagctcagagtggaccatgcactgctctgatctagcctaaaaaggggtggaatccgagggcctgccccagccaagcacacggtgtccattagcctattttggcatctggtctgactctggagaatgggcagggggccagtgctctgcagagagggtgggttgagcagacccatctgattagaggcaccagcagctgcctactcaggcttctgggacagagtgacggacagagcccccacatgctctgtgcttcagacctaagaacataatctctaccctctgggcctcagttctgctacctgtaaagtgggagcaattcctcctcccttgcttacttcccagaggtattgtaaggaaccagcaaagaggactagactgtttaggccttctagaacattccaaacacattgtcctttgctctgagagaaatgggagccactgaaggagtttgaacagaggagagaagcaatgtgccttagatttttaaaaggatgttccggatactgtgtgaggaacagatcacattacggggaagcttggagctgctgaaccagtaaggagactattgaaataatccaggccagagacaatggtggaggtaggggagctggtgagaaagggtcacgttctggatacatcttgaaagtagagccaacagaatttactaacagactgagtgtgcgtgtgagaggcgtgtcaaaggtgattccaagggttttgacctcagtaggagggagttgtcattgcccgggaagggaaggttgcaggagttgctggtttagtggggcgaaagcagaagtttgagtttgagacatgtgaagtttgagttgcctcagacatccaaatggaaatgtcaggtatgtcatcattaaataaataagccctgctgcctcctgaggagcacatgacttcaacagcatggactcagctttctaagaaatggcagcttggtcagacatgagtgtcagcattcgagcacccacctcctggccactgttttctctgtctgctcagcttcttaatatactcgcctcatctcccatgtctcccctggtgcctcagttccagccctactcaatgggtagctgctttttctctaagacactctgggtcgacctggaaaccccaaaagcaaattctgaatacttgaggcagcttgtatttaaaatcagatcatcctgtctctttagcccaggagtttgaggctgcagtgagttatgattgcaccactgcactccagcatgggcaacagaacaagatctcatctcttaaaaaaaaaaaaaaagaaaaaatcagatcatcccaaacaaatgccccccggtgtgtaaaaatctacccaggtgtttttgtgcactgtagagacagatatgtttatttcctataagtggattattatgcacgcaggagagctctgaacccatccctgccatgaacaggtggggaactattagtgagtcagtctttgagcctgcgtgctcatctgtaaaatgggcacaagggaagtgacaatcagagcggagttcaggaccacatcttctggacactgactcagccgggctcctgagctggtcttctgggttcggccagaatcactgattgttcaggaagcaactcctggagaccagattgttccaagaaggagaggaaactcaaatcttagaaatgggtggtggctttcctatgtcacacagcaacgcaggtctgaactggggctgggaccaggctctcctgaggtcagttcaggggatcaccctcaccctgcctcctcactgcatacacacactcccagggtctctgaacttaaagcagcccacttcctagccaaagaaacattccctcgaccccacctcgtgttccactttgccagggaccctccctcccttctctctcctccctgcctggacattctctctgtactgctgccacctgctcagctgcttggttttacgcagccccccatgaattcaaccttcagagaaaagtctagatttctggcctctgtgggtccatggacccaagtataaagtttatagagcatttactttgtgccaaatactgttatgagtgatcaatcacttaccaaccctcttagcaaccttaagacattgaaacaggtggggcgcagtggctcacgcctgtaatcctaacactttgggaggccaagacgggtgaatcacgaggtcaggtgttcgagaccatcctgaccaacatggtgaaactctgtctctactaaaaataccaaaattagccaggcgtggtggtgcacacctgtagtcccagctactcgggaggctgaggcaggagaatagcttgaacccagtaggcagaggttgcagtgagctgagatcgcaccactgtgctccagcctgggtgacagagtgagatgccatctcaaaacaaaagcaaaaacaaaaaacactgatactatcattagtccattttactaagtaaactaagtcccagaaaggtcaaaaggcagagctgggattttaaaaagtggccatcaggctcttaacccccatgctctggtggccagaaatcttgccctgatcaatttctatggtcactgcttcaggcagccccctcagctctcacccctgcctgtccctggtccaagagagccaggcatcggggggtagcctccagggaagatatgtccaggctaaaaagcagggaaggctacagtgggtctgggtcagtatcagagagggacatgggctaggacaggctcactctcagtaccgtccacccatagctgagtttggctctgccaggggctgggccaagccctgcaggccaagcaggagacaccccccagggaaggccaggccctgaaaaacaagcttcctccctctgccagctcagcctgcccagccccgctggaggcctcagtggcaaagccgccatcctccagggccaaggctgggctttcaggacattcaggccccagagcctgaggcccccagccctgccctgagctctagccttttcttctgaaaagagacccctgttctctccctgagcacatattttgaccctttattttctgcctaggcaagaagcagggagaggagccccagaatgcctgtaaggacatctaagctgtccatttaacaactggggaaactgaggcacacagcagagaagtggcttactaagattagtctgctggtaaagtggtgggcctgggactagaactcagatctgagtcactctcaagtctagccatccaccgcattgcagggcctctaagaggagaggagaggcttgggagaatgcagggtatgcttggaacacccccaaagaggagtgtgtcaaacagatgctcctgtgatgccagggtccacactttcctggtaacaagagagttaggacagagccctcaggactaaaaccatttccttagaaaaagggaaaaccaaaacaaagcaaaaaataaaaacacaaacagtcaaacccacaatgagcagtcatactcaccactccctcacatggaggaacaaacttagatggaagatgtggaggtggcttggtgttgccatccatccatctttccatccatccatccatccatccttccatccatccatccatcaatccatccattcatcaaacatttgtttgcccacataatgtattccaggtgctatgctgggtgattgggatttagcttttcacaaaccagtctcaattctcctggaaacagacaagacaagaggcaattatcaatatgcacaaatgtagccagctccatgttgttgggtcaagaacaggagacatagatcccgaaagagggcaccaaacctaacctaggaaagagcatggtcagggaaggcatctaggaggaggtgatgttggagctatcttttaaacgatatgtaggagttagccaggtaggcaagtgggaacagcaggtgccaaggcctggtggggcaagacagtgcagcctctttaaggaactgctgggaagccagtcaccctgaaggaggcttggggaaagacgaagtgagtccaacccatgtggatcttctggggcttccccaagccctgatgtttaggtttctgctctgacaaaggtcaggaggaggttatggagatgctgggggctgggccaagaacagggagcagaggcggggaagctggagaccaggcagattctttggaacttcctggaataagacctccaagttcatggcatgtccacggctcagggccagggtgcttgcttttctgaacccacgtttcccatttgaggctgaacaggtggtggaattctaggtgcttagagttagaaaatgatgatgatgacgatgaccacttatccctggataagggcctggcctggatcaggtttcccacaaatactggttctaattcttgccacactgtttgctgtggaggtcagggaggtcaatgaagtttcacccaggatcctacagctgctcagaagtagagttgggattggatccaggggtatctgatccgagcttcagccaggtgtgaaaggggtcctcagtgggacgggctgttgcaggtgggaccccaaagcaggctctgagacaggatttgtgtgaaagtggcttattagggagtgaccccaggaaacaccagagccaagcgggatgctgggtagcgaagggaaggaggccaagtacaggaaacaccagagccaggcgggatgctagatagggaagggaaggaggccaagtacaggaatgccagcaaggtgagtcctcaggcagggcagaggcggaagagagctggagtctctattgcccctgccctggcagtcgttgggtagtggctgtacccccaagggaatgagaggaggcatcagttttcgggcacttccagctccctctatgtccaggcaaaaggacttctggcagctggggcagcccacgacagagacacaggtgcaggctgctggggataagtgcatatcaggagctgctgtgctggagatcagaaagggattcctaggatctacaggtgcacagaggagctgagcaaccatcccaggacctggccagtttctgtggtcacctcgctgtctgcaaaatgcttccgtactgttccgcctccacacttttgcacatgctgtgctcactcattcaacaaatagtcctcaagaccctactatgcacccactatgagctaggctcaggagcagggcggtgaacagaacagcctggcttggtctttccccttatggagcttagaggctggctgggagacagacaccaggtcatcactgcaaagagatgtgagctctgaaaggaaagagggaggttctctgagaacagaaaaacttgatgtaaactgagggcatcaaggagagcttccctgaggaagtgacgtctcagctgagatctagtgggggaagagacacaacacagacagtgggaacagccagccacccagagcttccctgatgagggtctctcagccccaggagctcctgggggaggccagtcctgttcaggagacttggacaagctgaatcccttcaccgagcctcagtttcctcatctatgcaagcacgcagaagcagcttgggcttccagctctgaccttggctcaaaatatccactgagaagtgggcacagcagctgttggactctcagtgacctctggccctgtgaccccagagccttcctccctgtgccctctgtggtcagactgtgacctctggggcttatcagcctggcccctagggtaccccacgtatgatgcctgagttgcaaaacaactgcccagttccccagaaggctgcttgagaaatgtcagccctcaggggaagctgacgtggcgtcagtgctttcagagctattgcagaaatggctccatttctggagaaagcccagcctgcgtgatagcaagactggctgctagactcagagctggcagcggcttggtgtgcatccctgggcagcctgtaacctcacagtatcacagcttatcctttgggggcctgcaaaccttccatgcgtgttcattcattcaacaaatatttactgagtacctgctatgtgccaggcaatgttctaaacactaggggagacagcagtaaacaaaaaacaagcaaaagaacaaaacccaaaaattaaaggcctgcccttgtggagcttacattctgctgagggagtccaacaacagacaaataaacaaacatgtgtatacataatattggccggtgataagtactttgcaggaaaatacagagggacagaactgctaaataagacagtgaggtcaaggaagtcctctttcaagaggtaacgtttgagtaaagacctaaaggaagtgagagaggaaactatgtggatatctggggaatgagtacaccaagggtatacaaagccaagggaagagtaagtgcaaagatcctggggcaggaatgcacttgatgtgtaaggaatggcaagaaggccggtgtggctggagtccagtgatggagatggaggatgcattggacactggggttacaaacctgagtgcattttgtcaatgtgtttgcatatgtgcgtgtgtgtgtgagagagagagaggaagagagacggacagagagacagagacagagagaaaggagacacagagagacctggagacacatagcttcctttctttcttccaccaccccctccccatcttggcatcatcatgattaagagaggggaaaacacagatgattaaatgatttaaatgtgcaagtaaaataacacctcagtgagcacattatgcaaatctatttaattaacatcctaaatgaggtgaagccaccaaggcggatgagctaatttccctgggggctccagctccattcttgccctccctgaatgccagaaacttctctgggtggaaggaaagggggtgggcaggggctcacaagagggcctgctgcatgctggcacttggcacacaggggaggctttaccctaatttactctcaattagcagcaacagttactgccctgtttcatagaggagaaaactgaggcttggagagggcgcagagattagaacccagacctccttagagctctttgctaaaaaaattttcaacttgtctcttggagaggtttgagcctttagaaaggactgccgcttccttacatctttaaggcaggaattatctgcaaaccttttctgtaaagggacagataataggctttgtgggccagaaccaactgtgtctttgtagttcaaaagcagccacagataatctatcaatgaataggcatggctgtgttgcagtaaaactttatttacaaaaacaggtcccgaggccaatctacaggctgcagtttgctgattgctctaagggatctgactgaatcagagcttcccctgtgcaaagcagttaaccacggaaggccgtgggactctaggcaagtccctcatccctctgatcctgtttcttcacctggacaatgaaggaatgttctgggtgaggtccagtgatgagaggggggtgaagccgcccataggaagacagaagctgccctgaactttgggtggggcagaccctggcaagacactgtttggctactatcactgcatcacaacttcgtggtgtaaaactcgcagggtcctgtgggtcaggatagcaggcatagcataaggagagacagtttgtcctgatacgtgatgtcagctgggaacacttgaagggtgactcaatggctggagggtggaatcatctggaagcatctgcacttgcaggtctgaggattgacactggctgtcagctgggagttcagctgggctgttgccagagcacctctacgtggcccctctgaggggtctctctgcatagactgtttgggcttccccacagcatggtggctgggctccaagagagttaggtggaaatgcatttttatgacctagctatggaagccacatgttgtcacttccatcacactctattgtcaagacagtcacaaaggggaaggaacatagacccccactgctcaatagaaggagagtcaaggtcacagcgtaagaaaaccatatgggatgggtgatgttgtggccaactatggccaatacaatctaccccatgctcatggtgagaggcccccatgtggagtctgggcctagaaccttgcttcactgattcaaggcagcatcagccctgttactgggagcccaagctgttcagacccctccctccagacccatccaagccttttctggtcaaaaccagcccatgcttaatcctgggtctccttccaaagtaaccctgagccattgctgcagtaggactgtattctcagtcagagttaagccttttttcttacaaacaatgaaggagggccgggtgcacggtggttcatgcctgtaatcccagcactttgggaggccaaggtgggcggatcacgaggtcaggagttcgagaccagcctggccaacatggtgaaaccccctctctactaaaaataaaaagattagccaggcatggtggcaggtgcccgtaatcccagctattcgggaggctgaggcaggagaattgcttgaacttgggaggcggaggttgcagtaagccaagactgtgccactacactccagcctgagcaacacagtgagactttgtctcaaaaaaaaaaaaaatgaaggaaacataagcaaacagctcccacccacacgtcagccctggtgaccccagcatttacagtagagttggccaagcagatggagaaatgttgagacaaaactagctgggaaatgcctcccaagccacaggatgtgattatgtgtggtgggctggagggtggagctggggtcctggcatggacccccagagcagaggccttcacagagcagctgggtggaatggggtccccgccagaggctggggtgcaccagggtcacgcggctgccgcagatgattgcagagtggaaggaatcactgaggtcagagttgccgaggctctgcggggagatctgaaagcctgagcagcccccaatcaaattaacaatggctccctgacctggctcattcctgaattccacctcctccaccatctgatcctctccccagcaatgagagtgagttggaggaggagccctggactccagacagggagggactcgctggggtctcacaataagccagaggctgagctgagactagaacccagggccctgcctcttccactgaggcagtccagcagaggcctctggggcttcagaatcccttgtatgtacatgggtctaggccggacacagtggctcatgcctgtaatcctagcactttgggaggctaaggcgggtggatcacctgaggtcagcagttcgagaccagcctggccaacatggtgaaacacagtctctactgaaaaaaaagaaaattagccaggtgtggtggcacattcctataatcccagctacttgggaggctgaggcaggagaattacttgaacccaggaggcggaggttgcagtgagccgagatagcgccattgcactccagcctggacaacagagtgagactctgtctcaaacaaaacaaaacaaagcaaaacaaaacaaaacaaaaagggtctaatattaataatcatgccacctcccactcatggcactcacatgccagtgcttcacctcacagaaccccccaacagtgctagagggtaggactcctctgtcacccccatttccagaggaggatatgtgacttagagaatgaatggtggagctgggacaagaccccaagcctggcacttgcactcaggggcacgttttgtgggtgggaagcggccctccctgaaagtgctggcatgctagcatacccccagccctgttcaagtgcttggaagcttcctgacccaggccactggcaaccagaactcccagggcccctggctgaatccggctatgttgtcaggagttcctggcaagtgtggaagcaggtgggccccacagacttcccaaccccagctatcctagcagctgcagccaggataattgtccccattttttttggggggggggggtggggaaacagagtctccctctgtttgcccaggctggaatgcagtggtgtgatcttggctcactgcaacctccacctgtgcatcaacctccagggtagctgggattacaggcgtgcgccaccacgcctggctacttttttgtatttttagtagaggcgaggtttcaccatgttggccaggctggtctcgaactcctggcctcaagtgattcacccgccttggcctcccaaagtgctgagattacaggcatgagccactgtgcctggtcaattgtccccattttaacagataggcaaatcgaagcccagagaggaaaccaggccaccctttccagaggggttgaggcgaggagcagaagctgcagttagaccctagctccttccccagggtgagctggatgcgtgggaaccatggaggagcaggcacgagtgagcggcttcctccctgcagatctcagcagatcagacagtcgccatgactcatccccacatcccatcggccctgaggctgccctggcctgggacttcctagctccagtcttgttgctcaggggtgtggaggacaccagatctacccttaccctccacccatgcctggggagacattgttcttaatgaaacacaccagatgggtggggtgaccatgtcatttattggccaaaccagaacaatttggagagctattaataatgatgtggtgattgttagcattaaccaggactggccaagacaagtagggatgtctggtctctctattgacaactgcaatagtcattgcctaactccaagtactagacgcaccaatgtcagtcactcaggcatcagccacaggttagggccaaagtgttccggggcaggtatatttttgagaattcctcaagtcagggggcactcctaggggaattcaagtctacgtgtaggacatactttgaaatgagactgctgagtttgcatcttggtcctaccatgtaagggctgtatgagctcagacccgttacctattccctctgaccctgagtttcctgatctatagaaccaattgacccccgtagaactgttgcgggaacaaaaagagataactcagggtaaatgacccacaatgctggcacagcatatatgctcagtaaataagaggtcgttattactttgtattaatgtgattattaactatgctgaaaaaggcagacctcacactttcagatatggccttgccctggggttactcacagtgttgcggggaatgaagtccaggctaagggactgagtgctgggcatgaaggacacaccgagggttgtggggttcggagatgtaggagaggcttgggtaggggcatcagggtgggcttcctggaggtggcccctgggcagggtcataatcatgtcaagattaaggtcctaagaaacacctgtttctaaagagcttatcgtgctcccttttctcagtataactacataagagctcactgaagttcagctttttatcttcatgacttcaatggtctctttgggatgtcaaatatcaagttctttcccccaaaaagttcattgagctcacattaaatctgcttattgctccacccaggccaggaacagaagccctagagcttgctcaagcatgaatggaggatggaagtggaggcttaggggcaggggggtgaccaggggaaccctagcgagcagggcagcctgacctgggggtggagggaagggtctgagcccgagccagggccgttgctgcctctgggcctcttgagtctggctctgagcctgtcagctttggtttttcctcagtggggaccacctttctgttttctacggacatagctggacacagtggtcctccgcacatgctccctccagaacccacctagcatctctgattcccaaagccaaatcctgggaaaaaagaatcttattggttaccttgagtcacgtgtctatcgcctcaaccagtcagcctacaaccagtggccggtggcacggtagaagcagaactgatgggtggaggttgttggacatttactatggataggtaatactttgacatgtagaaaagggagaagccttttccaggaggagggtacagcatgggcaaaggctttggcggcagagaatcgggtgcttagtgtggcgaacaccgagtggctaagttcctattagccttcctgtggctgctagaagggcagctcccttagccacaaccctgcccctgtgcctggagccacagacacggcccagagagggcagtccggtgaatcagcagcagaacccaagctcaaactcctacctcctttttcccagtccatgcttgagtgtctaaggcataggagggagtggggggagaggaacagggagaatgaaatcaagaaataacaggcttcacaggagcggtaatgacattttaacttaaaaattgcaaggagatgggggctgcggaggtgtatgcaaatttcatgtagatgagatgcaaatgagcctgcctgctcctgcctggcgcacctggatgtggctcagtgacaaatcctaatgggctctgcgtggctgtgtgattgattagcaaggccggctgggatgacaactgcactcctctcctgggagctgggggagaggtgagactctgtttctaggcagacctgaaccccctctgataggggaccctgaggggtggctctactagttcaaggatagcaaatttagggcacatctactacttatatccctgccagcacccatggcagacatcattaatcaaacatagaattctttcttactgagccaaccaggtgctgtaggcagcccctactaatcgaaaagatttggcattcatcctttcattcattcatctgacaaactttgttaagtttcttccctgtgccaaacatacattgaacaggtagactcaatttctgctctcatgaaactcacagtttagtaggggatataagcattaaataaaatattgcaaaatggcaatcgagatacatgctatgaaggagaagtacctggtttttaacaaaagaggattttgaccacttcagagtggtcaggaaaggctgaacctcttgctggtatctgaaggataaggagggcttagctagttgacaaggctgaagccttaagatgagaaagagcttgtagcagacactgtcagtgctacacccagataccctatgatcacttcttgttgctgtgcttccctcctctggcttctctgtgtgtgtatgtctgtgtattttaaacaacttattttgagatatagccaatccaccatgcaattcactcatttaaagtgtacgattcaatggtttttagtatattcacagatatgtataaccatcaccacagtcaattttggaacatttttgtcatctcaaaaagaaatcctgtatcctcgagggatcactgccatatcctcccacctcccctatccccagtcctaagcaaccactaacctactttctccatatatagatttacctattctggacatttctataaatggagacatataatatgtagtctcttatgactaacttctttcatttagcataatgtttacaaagtcatctatattattacaggtgtcagtacttctttcctttaaacagtttttattgtggtaaaatatatataacacttaccattttgtttttaagtgtgcaattcagtgacattaattacatttgcaatgtacacccattaccactgtctcttttcaaaactttttcatcactccaaacagaaactctctacccattaggcaataactccccattcccacctcctctcagccactggcaacctcttaactactttaatgtctctatgaatttgcctattctagttatttcatataatggactcatacatattggtcattttgtgtctggcatatttcacttagcataatcttttcaaggtgcatccatgtcgtgtgtatcagaactcattcctttttatgtggcaagataatgttccattgtatgtgtgtgcgtgtgtgtatatatatatataacaaaatgtgattatataaaacaaatggaattatatgtgtatattttgtttattcattcatctgttaatggacacttgggttatttccatctttgagctattgtaaataatgccgcaataaacattggcatacaagaatctctttgagtttctgttttcaaatcttttgggtttgtaactaggaatggaactgctaggtcattctatgtttaactttttgaggaacttccaaactgttttacacagcagctgcacggttttacattcccactaaccatgtataagggttctaatttcttcatgtccttgccaacatttgttatttgctgcatttaaaacatcatagccatcctagtagctatgagatggtatctcattgtgattttgatttgcatttccctattgactggtgatgtatcttttcatgtgcttgttggccatctgtacatcttctttggagaaataactattcaagttctttacctagttggtaattgggttgtatttttttgttgttgtagtataaattctttacatattctgtatattaaactcatcaaatatacaatttgcaaatattttctcccattctatatgttgccttttcactttcttgataatttcctttgatgcactaaagattttaattttgatgaagtctaatttatccatttttatttacgttgattgtatttttggtgtcatatctgagaagtatctattggcaaatccaagctcattaagatttacccctactttttttctatgatttttgttgttgttgttgttgttttgagatggagtctcgctctgttgcccaggctggagtgcagtggcgggatctcggctcactgcaagctccgcctcccaggttcattccattctcttgcctcagcctcccgagtagctgggactacaggcacccgccaccacggccatctattttttttgttttgttttgttttgtatttttagtagagattgggtttcgccgtgttagccaggatgatctcgatctcctgacctcgtgatccacctgccttggcctcccaaagtgctgggattacaggcgtgagccaatgcacctggctttttctgtgagttttatagttttagctcttatatttaggttgttgatctatttttagtaaattttttaatatggtgtgaagcaggggtccaactttattcttttatgtttggaaatccaattgtctcagcataatttgttgaagagactattctttctccattgaatggacttgggacccttgtcaaaaatcattggccatagatgcatgggattattttgggattcaaaattctattcctttgtccatacatttatctttatggaagtaccacactgttttgattactatacctttgcagtaagttttgaaattgaaaactctgggtcctccaactttggccttctttccaagatgttttggccatttggggcctattgcaatctgttttaaatttgagaagtggctttttatttctggacaaaaaagcagttggaattttgataggattacattgaacctatatattgctttgggtggtattgacgtcttaacaatcctatccatgaatatagtgtgtctttccatttatttaggtcttctttaatttctttcagtaatgttttgtaggtttccgtgtataaatctttcatctccttggttaaatttagtactgggtattttattcttctagtgctgttgtaaatgaaattgctttcttaatttcctttttgaattgtttgttgctggtatataaaaacacagctgatttttgtgtgttgatcttctaacttgaaatttcgctgaatttattagctgtagtagctttcgtgtggattctttgggatttttgagatataaaataatgagatctgatcttttaaatatataaatagttttacttctgcttttccagttggatgcctttttcccctttttcttgtctaactgcgctggctagaacttacagtaaaatactgaatagcagtgctgcaagtgggcattcttgtctttctcctgacctcagagagaaagcttttagtctttcaccattgaatttgatgttggttgtgggtttttcataaatgccttttatcatgttgagtatgttcacttttattcctatttttctgagtgtttttatcatgaaaagctattgggttttgtcaaatgccttttctgcattgattaagatggtcgtgtggtttaatttcctttattccattaatttggcatattacactgattgattttcttatgtttagctatctttgcacttcgagaataaatcccacttggtcatgctgtataatccttttaagatgctgtcatgtttggtttgctagcattttgttgaggatttttgcatttatattcatgaggtatattcataagtttagtaattttctttgtgatgtccacatttggctttgatatcaggataagagtggcttcgtaaaatgttaggaagtgacttcattcctttttaatggctaaataatatttcattatgtgtatatttttaaaatccgtttttaaaaaatccattcaacagctaatcaacatttgggttgcttctactttttgactatcagaaataattctcaataagcattcatgtataaatttttgtgtggatatgttttcatttctcttgggtattgacctagtaatggaattgtttggtcatatgataacttgatgtttcacagtttgaggaaccggcaaactgcttgccaaagtagttgcaccattttacattgccaccagcagtgtatgagagttctgatttctccacatcttcaccaacacttgttatacgtctttttattatagccatctttgtggatgtgaaacaatatctccttgtggttttgatttgcatttccctgatggccagtaatgttgaatatcttgtcatgtgcttattggccatctgtacatcttctttggagaaaagcctattcaggtcctttgtccagtttaaaatttactattattaatagtagtatttagctgtgagagctttttacatattattgatacagaatattatcttttatgggcccacacttgcaactctcttccaaggtctgccctggagctaccagactctgctttgtgccacatgattctgcagaaagcctgaagtgccttggaggtgtaaaatgtcctccagagttcccccacgcagtcaggcagaggcagggacttggtctgaaattgcaccttggcttccctcccttccctgttctgcttgcctttctggtttctcttgtgatcacctcttcaatgaatcacctgtacctgaatcctcacccctaggtccacttctggggaacctgaccccagaaaaagcttggaatggctgaggaaatgaaaacaagttagtgcttctggaactcagaagacatggagattgagatgaggctgaagtggagggcagaggctgacaacacaggctttgtagatcacagaaaggttggattttctatctggagagctatgaggtgctactgttcagggttaagcggggctgacattatattacattttgaaatacccctctagtttctgggtggagaacagatgaaggggatccaagtgactgcaggaagaccactgcggaccctgttatagttgtctggggctagaggatggaggctgggatgagggtgaggacgatggagggagagagaagtagaagataacagagagatcaggagagtggatttaggggttaaggggaggtttgaggacaacttgcaagtttccagcctgggtacctggatggatggtcagtgcacagagagggaagcaggactggaagggcaggtcagagattccacatgcaaaacaccaccagttttccttcctggtctgacctaatccctccatttcacagatggggaaaggaggtcctaaggaagtacctgactacccagagttccccagcatgccccaggcagagggcaatgggacccccagagtcctgccgcctatccagagcacttaccctacaggggactctctggctctggcctcagagagctattttcagctggggtttgagacgaggcaaatttgtcctgggctggaggccaattcacagcccctggagaacaggacatctctgctttatgaggtcagactgtattctgaccccagccagccaccctgtctgggtctaaagtgggtgtgacagccaccctgtctgtgtcacaagggtgtgaggggcctacctcaaagtggctgacaaaacacacgctcatccacaatcctgggtttggcattgatccagaaccaggcccagaccctgtgctttccccttcttggcccctttcctggctgtgtgaccttgggcaagtcattgcccctctccaggctttagtcttcccatctgtaaaatggggccatctcagagtatgacttctgtgacccaaagggttgtagtaaatatcagatgggaaatagatggacaaaaagtgctttgcgaactgtaaagtgcctagacttctattggggctcagtcctatgtctgccccacatcactgcccagcagtgaaaagtcttttcaaagctttgttccttcacaagatggctactcctctggaaaggaagaagtcttggtgtggaacacaaggatccagagatcttattttcctgacccagcaggcttggcaaatccagtggacagatggaaaaactgaggagcacctatctactcagaggcactaggctgttaagcctggattcaaaagcagggctctccaagatgagaaagatcctcatccatccaacgcctccattggaaagatggggtaaactgagcaccagagagaggaagcaacctgcctcgggtgaccaggccatcagcaacagggcagagtggcacctgaagtgcctgacttccaggctgtgcttctctttctgtctcttgcctaccagccccttgagcttgaaaaaagtgttcccatcacagtgggatgttgacagtcacatcactggctgacttggggttccttgaaagcccatcttcttccaccacagcaggcttcaaactttgtttaaaaatcccatggaggggcactgtggcctctgcctcctcagagcagtctctcaggggctgaggctttgctgattcaaagctatgtcatcactcgcagggaatctctgggggaggccatgccatgccatgcccctactgtgggcatatttgggcaaagtcaataaactaggcccagatcaagtccagctctgcccctcactgtggcactgggcaaggtacctccaaatctctctgagtttcagctttgtcctcagtaaaatagggtggaatcagtcctcataatgttgtaaaaaaaattcaacaagccctgtaaagcttttagaggatttagctcaaagctaggcacaaagaaaatgcaaaagaaatgttagctgttattattcgatatttttatacattgttactcattatgacatttcatttctgcattcccttcttccccaggggatgcagtgaggggagagattgttggggtacagttctttctggggacagagggatgcacaaggtaaccttggggactcctcccgcccaagtattcttagattacctgtgcccgctttgccccccttccttctagcagtagctgtggtctctcacaagtcagtttccatcccagcaccccagtttctgtggctccctgcctgtggtacccactggctggatgctgttgctatggcaacagcattttaaaagccgtcggccctctctgaggcaacaggcatggatggagatgggctgatcaacgcctcttgcatctttgggcctgtctggatggaaggcagggaggggaatgcaagaatcaaacctggctttgggtggaggactcaggccccagccccgggtgttccccaaatgcacccccactttgctgagtcacacaggaagagcacttggctacaaacgcagattccagccacctgccagcaccaagagtctattttaatgtctggggtaggattccctaggaagccttttgaccggctctgctcatggctctgaggcaggcaggccctagaccacacctggggaagtcttcagtcttggaagattcctgaagccattttaggtatcaagtgtgtgactcttggctgagacagctcctgagaagccctagttgtcctcctgtgcctggcccaggcctgcctctctccccttcacagcctcattgtgggggacctgtgccccacagcctctttctggagccaggaaaattcagagctaggtgaccaagaggccacttcagtaatgcatcctactgcagaggtaaggcaaacactttcagcttaatgacactccagagaggcgctggcaggggccactctggccagtatgaagggtggggcttctggatgctccatctaagatccgacagataggccccttcccacggtccccaaccaccaggacccagctgcccacagaaccccaatggtactgggccacagaggctgggcatagagaagtggaagttgggcagggaaggggacagaagacattgagttcagggaggcttggtggggaggtgagagagaggagggacctctaaggcggagaggattctctctggaggacaaggacaaggttccacagggttccttgaacttgagaatgaaggtcccatgcctgctgaagaggccttgtgagacagggagcacagaagacatgtccttcctttctaagcacaggaaccggcctctggctccaggaggcaattctctttgccaagaccaatggagctggctgtgcgtgctgtctacgagtgccagctcctgagggttggcagataaatgctctggatgcctcacgcctcagggggtgttcaaggattccatgctgtctttcagagatctccagaaagatccagctacagttgccaacatggaaatttgtatgagggtggggcacagtggctcatacgtataatcccagcactttgggaggctgagtccagaggatcacttgagcttgagatcagcctgcctgggcaacatagcaagaccccatgtctacaaaaaataaataaataataagctgagcatggtggtgcataactgtagtcccagctacttaggaggctgaggtgggaggattggttgaacccaggaatttaaggctatgattgcaccactgcactccagcctggacaccagagtgagaccctgtctctggtggggtcggggggggtgggcggaaaaggcaatcccagcactttggcaggccaaggcaagaggatcacttgagcccaggagtttgagaccagcctgggcaatgtagtgaggccccatctctaaacataaaatacaatgaagttttaaaaattaaaaaaaagaaaatttgcttgacaacatactctttattccctttgcagattcgcctcctactcccccagcagaggttcctggatcagcaccaaacacactgatccttaaatcctcatctcagggtccattttcctggaatccaagacaaggaagcactcccgaatctccccgaggattctgcctaagggcaacactggccctcgtacccgaggggagagctgtgtatgttcctgagctgcaggtgggtgtctgcctgcctgcgagcgagacctctggaggggtctgtgccgacaggtctttccacaatgagagcctggagggatggagccaatcacaccatttattgtgccctggttctgacgcccactcttgctattctgcatgggtgaagatcgggtcttccaggagttttctggagccaggggcaggtcgacagttctcatcctcccagcagaggcagaatgtaaaaccagtgctccatggtgacgtctcactgggactgaccagagctcccagctacccctccagctgggccctggcccagtgctcctggaggctggtgcgactgaaggggcctctcagctagagggaggcaaggggacttgtctggggtgagtcctcaagggatgtctgtgagtctgtcccctctgaggagaagctgcccccagtgaggcgagggacctggctctgcctggggggctgctgccggaagaaggtggtggcaagcaaatgctcgcgggcagggtcaggcagcttgtgggagcctttgccgtcttcagcctctgcagcctggccagcttcctggggtggagagcctgcctggaaagttctgttctgttcccctctggggggcccaggaggccaataggactttggcaaatggtccatgcccagtgagtctagtggaggctgatcccacctccccttggaagtgacctctacactcacaccctggcccttggctgccacccctcttcgttctgggcgcgctgagtgagcagctggagcctctgggcaagagctgtgggtcagtgccttctccaggagcatccggatctcctcatgcctgatccgggcctcctcccatagctcctggcccaggcctgcccggctcagggaggccacctgcagccccacggctgcgagcttctcagcagggaactcagatgccagtcgctgcaggtagcggtggaggcggcgctggtccccaggactgacccttgaggtcttgtccagcctgagctgggccatcaggtcctgacagtccatgtggaaccaggtcatctgggggacaagaagagagggaggtgggggctcaggctggaagtgggaccatggaggactgaattaataagtgcccaatgccagggccccgctcagcttggccatgatcttctccactgaccatgatgaccctggtttccctctcttccctggggtgcacacacctgccatctggaaacagcccccaagcacccttagaatcatcagacaccttttttttttttttgagatggagtctcgctccatcacccaggctagagtgcagtggtgtgatctcggctcactgcaagctctgcttcccaggttcaaacaattctcctgtctcagcctcccgagtagctgaggctataggcacctgctgccatgcccagctaatttttgtatttttagtaggacggggtttcaccttgttggtcaggctggtctcgaactcctgacctcaggtgatccacccgccgcagcctcccaaagtgctgggattataggcatgacccactgcgcccagcccatcagacaccttctaatagacctacgggccagcagggacttagccctctctggggctcagtttcttcttctgtaaaatggaagttgcactagatgatcatgaaaagccttttgagaggtgaaattcctctccatggttgtattaacccttgagagtgctgtgagggaggagtctgcctaatgcttattgagcactgaccgtttgccaggttctgtgtgtctcaggcaggattgcactgaactgcaccagcagcccatttcacagagaagaaaactgaggctcagagaagtgaactcacttgccctaggtcacatagcaagtcagggaggagctgggattccacctctgatctgtcctccaagcaccttcatgggcagaaggagaaaccggccaggcaggggtgtgccctcaccatcacaccttgagactgtcagccacaccaggcccgcaggccccctccctccagccgagcctctgcctcattttgtgattctgtctgtccccgcttcccccacaaaacgtctgcagactgcaaagaagccaacacgttcccagccgctcgtgaaaaacataatctttctctccattaatttagaacccgatagcgagctgttaggctgtagggattggagaaccattttctccgaagagaccatctttccacggattaagggaacttgactttagataaatggcttcatattcgtgcaagcacacggagctcatggccgggaaagagctccataaatctccgttagtggcaccattgtgttattattatttaggaccaaagctgctgcacacacgctccccaccaggggctgagcctggtgctgggctgtcccatcatctgtctgtgtgtccaggacttgaccttccaggctaagctggacagagatggatagcacctcagaaatcatcttgcccaaccccttattgaacggattgaaattcagggccagtgaggaaacagggccagcccagttccaacagcgagagttggactcagagtcagggttgctacctcccccgtatgacttctaggcctggcacagacgccacctccacacaggccatccccaggcttccagcctatcctgactccccgcacagcctccctgagaccttgtgggccgagcccgtgccaggcaccatggatagagccaggaccaactcgaacccagtccctgtctcagggagctcgcctcgcaggcaccatgcaagagacaagcgagtgacaaggaccaggacaacttcaggtcaaagtgagcacccagaagcgacaaaacagggtgacgagagagaaccagagtgggcagtcagaaagggtgtctgcaaagaggggatgtgtgagctgagagcggaagaaagacaagaagccagccggtcaacgggaagagcttcccaggctgagggaacagcacgtgcaaagacctcagagttggagcacgtttgatcgatccgggaaggccagtggggctgaaattggctgaaatcagtgggcaaggcaaagaagctaccagatgtctttaaccctggaggcactactcctcttcttcctcctcttaatgataataataatattgatgttaataacaattctgaatttgaacaaagccctgtgccaggggttacttccattgaaatctgtcattagctggtaaggctggcagtagagccagatggtctgggtttgaatctctgcccactcagttagctgtgtgaccctgggtgagttatctgacctctctgtttccttaggtggaaatgggcataatagtagtacctgtctcataggatcggggcgacaataaaatgatacgtgaaatgactagaacagggcctggcttgtcataagaactacacggccattaactatggtcttagcaaagagctgaggcctagagcagtgaagactgtggttgaggtcacagagctcacgcaaggacatgaagccccagactccaaggctcggattccgcctgtatcgtgctcttaactgtacacagctggaactgggggagccctttgctgccactgccaacatctgcctcccttgcccactgtcccaaggagacagagagtgccctgtcctcccagggccccaggcgtgagttgaccagagtccctcctgctgccctctgaagcagcctgtgatcgctgtggcctgcacgtggggctggcctgacagctgggaggctggggtcaggtctttctcatgctttgtccttggtgacaagtgcaaggggcagccaagggcactgggtctgggccagccatgggggtccctgtcccagctggaccacactctcccaggctgctcctttgtccccacagacctcagttttcccataatttttttttaaagagagatttggctacatgaatttaggacaggtggcagctcctaaatcaaatcatccttcaccactgccctctttgggcagttttctcatctgtaaaatgggaacaacattggttccctgtcatcaaagaggtatggataagaatgaagtcaagtaaggtgtgtgaagtgctcacaggaggtctggcatggtgtacacactcagaaatgtgcactcccctcccaacaacccctcatcctcaccatggtcaagcctgcttggtgaagggatctgtcgtcatttctcttctctttggggaagcatataaggcatgtcacggggtaccacagacacatctatgttcaaatctcagctcttccccttcctctgtttttttcctgttacaagacttggggagtgaatcacgatgagcctccgactgtgtctgggtatccctgtccctgctgtgcccccagccaggggatgggggtggtgtctgtgcaagtgggtgggggggggctgtgtctaggtatccaagggatgggggcggtgtctatgcagtcaggccatggggctgtgtctaggtatccctgtccccaccatagccccagccaggggatcggggggtatctgtgcaggtgggccgcggggctcaccctcttgcagaagcggtgcaggtggagcagcgtctcgaggtccgtgcgttgccgctcggccgccatgtaaaagtgggtcagctcagcctggaaggcccgctgggtagaggcaaaggctgccagctctgggaactctgcacgttctgcctccccagcccctctggctgtagctcccagctgagcggcctgcttggacagctccaggcctcggcggtactgggcctgagaggggagaggagggggcgcccactcagcacccaccttggctggggcctccctcggaggtcagcaacctccagctgccttgctggcgagccaggagacttcctgagcttcagtttcctcatctgtagaatggggaccctaatagcacccacctcacagggcttagctcctggtgagggttgaacaattaagagcagttatcacgcttctggaagtctccaggccctcgccatggcagttcactttgcctagccgggctctgcttagatgttccttctggaaaacttctctgactccaaaggctcctgctctgagtccccacattctcccttactgtgcgcttccctgtttgtccccgcccccgcccccgctccccactggcctgagaattcctgagcgctgatacggggctgaatcaccctgtggtccagagccttgtcacatcgcatcacgttgatgcagcttccctgccctccaacccccggctctgtgaggctgagttattaggtctaggatggggccctggaaactgcattttaagaaaccctctgggggattcagaatattctttgggcttggccatctggtaagaatctctgggggagataacatctcagctgaactctgcaatccaagctggttccctcactgtctctggaacttttcttgctctttcccacctccacagctttgccctggcagtgccaccccctctaacgccctctccatctgctccagtcctgctcctctgttgtctggaacgcactgcagcctggaggaagaagttctcaaattctgcgtgggctttctccactgtctccaaacttccatccttgggggtcagtgattgcaggcaccgccttccttcctgctccatccagtcgctgacctggggcaggagaggcagatttggacatgaggggctgctaggagacctcccttgtccagctcccccacttccttgcaggctgaggtcttctgtcttcactcattcagtggctaggcctgtgaccactggcttggactgaaattctcccaattctgggcgtgggaagaaatgacttggggagggggagtgtgtggtcatgttcttcaaagcgggaccctggagggcatctggcctggccaacgccctcagtgcacagttatctgaatgaaggcacagggtggtgaacttcaggctactctaaccactcagagacgccggatcataaaaggggtggcctcaggggtgatgagctccctgttcgggtgtgtgtgtgtgtttgtgtgcgcgtgcacatgcaaacagtgctggagaagaagctgcaggctgcagaggaaagtccatgggcctgctgggaactcaccatgtgaacatggtaagccactccccctttctgggcctcagtttactcagtggtaaaatggggtagacatgaagattcaatgagggatagagggtatataatggctctcaaccccgagtggaagttcctttcttattctggggcatcttaaagagcctattcactcactttatcttcacagatccaatgtagcacgtactgatattaccccccattcaacaaatgaagatactgaagcactgaagagttaaacatcttgtccagggccacaccacgagtaagtgctggagccaggaatgaaccagggctgtctgatgcaggagtgtgccgtgccccacagctccaggctgacaggaatgtgttggttctcggcaccggcagtcagatgaagccacaccaggtgcaggttccagaatcagaccccgagatatgcaaccacaagcaggtaacataatgtctcccagcctcagtttcctcatctgtgcagtggatgaaatcctagcaccttccccatgagttcagaaagcaatgatgttcacaacggctctggcccagggcttggcacagagttggcgctcaataagtgcagctcttggggctatgttttcacccactgagcacttattgagcaccaggtcatgtgctacgccccaaggatgcctgcctggcctttgaaggatcgccagcttggtgtcctttctccagaacaaagcacctgactagggacgggcccagagtcggggctttcctgtggaatgtggccaggcagaacccccacaccccaagccagacacccctttcacctggtgaatggcagcttccaggcggcccaggcggacacggagctccagcttccccaggaggctgttggaagcggtgaccagaacatgaagctgctcgtccacaaggctgtacaaggcagtggctgcagccagatggctcctgggaggtgggcggaggtgagaaaaggcctctgttgccctcttcaccctgctgtacttctgtcccgcataggcctgcccctccatctctgtggccccagcctgggtttccagctaacttgctgtgtgactgtgggcaggcccttcaccaagggcctcagccttggtcttccatgggactgggaggacaagagaacacagtaggaagtgaactgaccctcccccttccctagaagggaatgaagctggccggacagatctgggttcaaagcccagctctgctgccttctagtaggaggctctgtgcaaatttctcaacctttctatgtctctgctttttattctgtgaggtggagataatcacagaacccacttcatagcatggttgtaaggattaaatgatctaacgccctggccctcaactctagctatacattataacctgccctgggagctttaacaaatcttagtgccctgccccaggccaacaaagtcagactctgagtgcaaccaacacactgatgtttcccttttttttttttttttttttttgagacggagtctcactctgtcacccaggctggtcacccaggctagagtgcagtggcgcgatctccattcactgcaacctctgcctcctgggttccaacgattctcctgcctcagcctcctgggtagctgggattacaggcacgcaccaccatgccgggctaatttttgtatttttagtagagacagggtttcacatattggccaggctggtcttgaactcctgacttcaggtgatctgtctgcctcagcctccaaaagtgctggcattataggcataagccaccacgcccggctgagacactgatgctttctaaagcacctcaggcggttccagggacagccagggcagagaaccagcgctcatgcgtgcaaaacacttaacacagtgcccagcgcacgatgtttgtcaggtccgtgctatttctattgcaatggtgggaagtagctgcaacatgcctgccggccctgcctccatttcacagatgggaaaactgaggtcaagggaggggaatcgacttgcagatgacaacctgagttggaaccccacccagggctgtttctgcacataattttaaaaaatgctcaaagccacaagtcactaaggaagaagtgtggatgggatttcaggcatggtgatatttgtgtgaagggaggaatctccaaccctgctctgccctcctctgccttcagagggaaaatggaagagagaagatggaagaaaagcttttgacttcctggagggtgctttgctctacctcagcctccccatctgactgcagctccccacgggttgccacccttgcagggaagaggtgtggcccagggtgcgtgaataggatagaaaatctctgcctgcctggagagggagggacggagggacggggacagcctaggggctgcagggacccgctgcagaacaaacgcccacagcagctcatgtgggaccacagtgacccctgctggagatgctggtagctgcgggtctgcggggcctcggatggacaggaggggcctgggctggtggggcaggtaagggtggaagaggctgagaaaggcagtgccaacccccaccaggcactgaggggcagggagatgaccccataccagtgctgcccgtgcgtccatctgtgtaagcctgctctcaagtctagtgcagctctgggtggtgtgttcaagattctgggaccagactgcctggattcaagtccgggccccaccacatcccagctatgtgaccctggactaatcacttaccttctctgagcctcaggttcctccactgtaaaataggcataatatctgcagctacctcggagtgaattaagtgagctggtatttgtaaatccctgagaaaaatgctggacacatacaaagtgctatttaggtcttggttctgtaaacaaaatgttcttaaaagctcatgcataccagcccttgactttgaatataagtagctgtgttctaagagggtgaaaatacttgcaattactgaccaatttaatgactgacttttccccaccccctaaatttaagaaagctgggactttccaggaatgtctataatttattctggctctgagacccctgagacaccatgaggttctcacaagtgtgtctgagcagcctaccgggaaaggcagggccgggtaggggttaaatgcccagaaggcctggcttcaaatcccttaccagccgctgtctagctgctatttcccttcgctgagcctcagttacccatcagccaaatggacaatgtggacctcacagggttcttgccagaaataaatgaggcaggctcttgcaggggttcagcgtggtgtgtgggtcagagaaagtgcttttccaaaagggtgaccagaaatgggtaggcgacatcctctgatgcccatcccaggctcaagatggctggggctgaaggagggaaagcagagaaggggcgaggaaattgccagggctcagggcaggtttctgtgaccaggcgtcagcctgggatacaggccctgcaactactgcaaagctgggcgccctcggggctcagctatgtgtgccctaggtggtgtggtcccagctccaagctcctgggccagaaacaggatggggtggaagaggaaaggcctggacgtctgtacctgacatcagggctgaagtccagcctgctggcatcatgctgcagcctggccagggtggctccaccttcccgctggaggcccagtaggccggggtccctcagcacagcctccatcagctccttggacttgctcaggcacctggtagcctcctgccagcgtagggaggtgccctgaggccccatccccactctccctctgcaaccttccaaggctccccacacccagatcaagtccaactcccagtttggcattcaaggtcctccagaaagtctgtcatttctgtctctaaaacatcccctctagccatgtcccctctcgtcaccacggcaacctcattggtccaccctccagcatctcttgctgggacacccattccagcctcttcgctgatctccctgctgccctctggctccccctacagtctgttctccacatggcagttgaacggatctcaaagtgcaaatctgataacccctggtttaaaactctccagtggctttccctgcaggcttcgaactgaatcccagcccaactcttccttggtccagctcctgctgcatctagaagctccactcatgcttctttcccactcattctgctccacactggcctccttgctactcctgaacaccccaggtataatcccacctcagggccttcacatgtgtttgccccctgcctggagcacagccccccacaaaggcaggctccttctcaaacttcaagcctcaacttaaactccagctcttcagagaggccctcctccctccctcattattcccaatcttacttccacaggacttgacacaatttggaatgacatacccatttataatagtttgctttttaaactaccacctctgccacagcaccacgagccccaagagggcagggataagtcagtttgctccaggctggtctccagtgcagggtacaaagtgggtgcccctcaaatatgagtcaaatgaatgatgaaaaacaggaataatgtcctcccccttttccccaggccgtccccttctcgaagcccttggtccatggggtctggggtgtgatgtagcttccccagtcaccatgctccaggctcacctgcatccccccaggggggtcggccttctcgaattcctcgatggaagcttgtagcagggaagaggcctggtggaggtcagcaaggaaagggtccagcttctgcaggacagaggaccaaagggcaggtgtcagcccaggccaaccaggaggatgcctcttgcatctcaggagcacagaggggaggtgggaggcagtggctctccaactccaggtgcatcagaagcatctggagagctggttaaaacacaggctctgggctctgctcctgaggttctgcttcagttcctctggggcgaggcatggtagaaagtgcatttctaacaagttcccaggtgttgctgatgctgctggcctggggaaccacactttgagaaccactggtgttgagtatgagtgagggagaagaaaggagacaggcctgagcgactcccaggccagtggggataccatgattggtaaggaaaggaagagggcagagttaggggaacattttcagctgagtcccacttcggcccagctccatcacttacaagctgtgagaccttgggcaagttacttaacctctctgtgtctctgcttcctcctctttaaaatggagatcatagtagttcctgccttatagggttgtgtgaggattaaacccattaatatatgcaaggcacttagaacagagcccagcccatactgtgtttatcatcattctcacttccatgtagtgggtctacaggtaagatttcatgtaaaggaaagggtttaaagctaaaatacagttcaaaaaccagtggattcattggaggcctctggaaagggaagctaggaccctgggggacaagcggaaaaggagattgttcagtaggtatctttttggaccatttgaaatgtgaatatacttactgcctattcaaaaacacacaattttaaaaagatcacttgggcaaaaagtaaataagccaccatgttacactgttagtatagaccggcggttctcaatgaggggtgactttgcccccggggacattcagcaatgtcaggagacttttttaattgtcataatttgtggggtgcaaacagtgggtagagccagggctggtaccaagcatgccgcaatacacaagacagctcccaacaaaacagaattgctcaaccccaaatgtgaataggttaaggttgagcaaccctggtctagagaggacccggggcgggcattgatgggcatcggtttcggtgtggtttaagcccaccgaaaggcaccctcgccctatgtgtcctcgtgtactaaattgggtatgaaatgccccctcttggggttgtggggaggagggactgtgattacacaggaaaggagcccaacactggcggctgccttatttcctccctcttataggagggaaccagaccctgagcttcctgagttgtgtgggtccatagagcaagtgcctgtaaatttattttattttattttaagattctttttgagacagagtctcactgtgccacctaggctggagtgcagtggtgtgatcttggctcactgcaatctctgcctcctgggttcaagcaattctcatgcctcagcctcccgagtagctgggactacaggtgcataccaccatgcctggctaactttttctttcttgtatttttagtagatatgaggttttaccatgttggccaggctggtctcaaactcctcacctcatgtgatccacccatctcggcctcccaaagtgctgggattacaggtgtgaatcacagcgcccggccctgtaaatttattttcagttaacatagacctagctctttacccgtattaactaaattaatcctcacaaaaaccccatgaggaggtactattattatcccctgtttagctgatgaggaaaccaaggctcagagaaggtaagtaacttatccaaaatcacacagcagagctgggattgcaatgtaggcagcctggccccagagcctgagctcttaatcatttgactctgtaccttcactgtaaacatttgttgagtgaccgtttattttttagcatagcagggttgatggatccatgggacagaagagtgaagagaagaagagaaggagtgggggtcaggggctaaaggctgtgacggtaaacacctggaagaaatgaacccactcggtgtggcagtaggggaaggggccttccaggactgcgggcagctggctggggtccacatggtggctgagggccttcaatgaggtcagcacctccacctgcagaccaaagaatcaggagaaccagggactcaaagtgaggacagtcattttagaaggtcctgcccagatccctgccccagcaccagttcatttcccacaagtaaggttgactccagctttaaaagttgctttgccagcaaccaatcttctctggaaactctgacaaatcaaaattcagaaccagaccctggttagggaatggcaaataaacagcactcatactgccactctcctagcttgtgcccaaggcagacatcattaatcaatcatagcactcgttccctctgagcttggctctttcccagtacagctctccgggcaatcatacaaactgatggaagctggcccttgtgatgaaacttctttgtaatctttgcacagttccctgaggagccaagagctgtttccttcttggggctggtgagaaaagtcactaaatcccaacagtgtcctctaagacatggaagaactaggtgactgcttctgccaggcagagaaatttgaggtttatgctgggaatagctccagatacctaggcttgggatttggtggattctgtggtttttttggacccacctgatattcctgctactcaaagtgtggtccatgggccagcatcgccggcatcacctaggacatgttggaaattcagagtcccaggacccacccagaactactcaatcagaacctgcacattaatgtatttccccaagagatcagtaagcacattaaagttggaacagcacacctccagcccacaatctgcctcttcactaaccaggaggaaggagagttttaaaatcacatcccgaagcaggacagaggactgactgcccttactcattactgtggtgtatggcactaattaaagggagctgcagggctctttcctgcagagtcccgcttcagctccacatctgtattaattagggcgagaaatacaggaagagcaggtgtgaccgcagtgtgaaaaaggcactggagtcaggtgactccagctctgcgtctagcttgctgtgtggccttaggcttcagtttccccctctgaaaacaaagggaggagggatggaccagatgaagcttttcaaataggttctatgccatgtgcaattctcgatcatgtggcagcacccaccaggagctgctaggattgccagagagatatcactctgtgactgatttgacaatgcctgccacggatctatactggggattggtagcgcttaggcctcgtatttattgccttacactagattacctccaggcctcttctagctcatgaattctgcagttctccctctccttaaccccagctcagctcgagcccaacaactcccttcctcaaccgccgaccctgagtccccctcacctggacgtcaggtaatgtctgcagctggagagccgcctccttctcccccaggaagagaatagcccggatagaggctgggacctgagcctgtcaaagacaaccactgcagagttgctctgcccaaggcttcatgaagcctcacacactttgatttcctccttcatcccctgtaagatgcaggcaaatgggtcacaaggacagagtggggtccctccatgactggaatctttgtgtgatacgtttggaccgtgaatcattggttagaagtcatgagagcagcaggttcaagttgtgttgcaaatctttccagatgacctgcccctctgggccccagtttgcccatctacaaagcaaaggaggtcagaccataaggtaagcagatgcagaacctccattgactctgctgcccataattgctggataggaatcttctctcctcccttctcagctcatgagctttatgtgatctaagtctgagccaatcagtgtgttgcattcacccccaggccacagggttgggtgtggagggactcctgaatccactgtaactgagacacaaagaaatttttgctgagacctctgggaaaataatctcttactctttcctaatggatttaaattagagaccatgtgaagtcagagctgctgggagccatccggccaccaaggggcgcggggtgccaagcggggtggcttggcatcctccaaagagaacggggccagaaatggagagagaggaaccaggttctaatgataatatctgagcccttggatcaggccatacttgaagctggacttggctcctggactgtccattgacatgaaccaatgagcttcaagcttgttagggctgagttttctgttggctgcagtaaaagtccctgcctgagagtcctggtcccagccttaagcacccccggactctatgaatgtcaggaggcccctggtggctcccaggacttactaggctaaggctctccacctcccactcacctgggtggcctgcagggcgctgaccagaccgggctgtgggggctgtctcctggcgtcaatcaggaccgccagccccttggctttatcttcaggcctgtgggtggtaaacagaattgacagtcttgctggatggcctcggacagggggcaggacctagtggaaggtgagggaacctggctgctagaaaccttgatttactggtgaactcttcatcctgttaagaccaagttccaatgccccttctaggaagccctccgtggttcttctccaggcagagccttttgcttcctctttggtgctcctgcaagacctcatacagccctcgtttatagccctactattcctaactctagcaactaacccaggtacagtaggcaagtcacttgggactcatccacttttttgtgtaggcagaatccttattttgctcaagaatccaactccctccaaaaagccaagttcccccagagcctggcttctgattggttgaggccaacagtagtgacgtaattcctctggccagtgattggtttagatggggagggtcatgtgacatttctggccaatgatatgtgagggaaagttttccagggaaagaggcttctgggaaagacattccctcctttaaaaagttcttaacaaagagatatgaggcagagacatacaatgatacatttccttaacagataaaacattttaaatgggaatttctgttgattgcagccaaaacaccctccctggttcagccacattgcactgagcttacagtgggccacttttcagtgactatcttaggattttccaaactggcacaattttcaagacttgttaaaatacagattcctcaccctactcctctcccatccccacccctctagccatctggccagtgggtacagggtggccagggaatctgtgtggttccaagcaccctcggccagtctaatgatcaggcaggattgaaaaatagcccccaactgccctcaagccttacaaccactcagtgcacagacaaaacctgaggtggcccagtgggagggtagagctgtggcactgccattagtaccttgtggtctgggcaagttatttcatctccctgagtcaatttaataatgatagtaccggccttatgggctgtagtgaggactgatgaattcattcttgtaaagcactcagtgactgcacagagtaaatgggatgtaaatatttgctatgattatcctagaaggggaaactgaggcacagaaaggcccagtggcagatagtgacaggaggctctgggaggtgatttcaagtctctgactttatgtccttgcctccctctggcgatgcccatgctggacagtgatttgtttccagacctgtctctgctaccaacctggaggcccttaaaagtcagggcccggtgtgaggtgcctctgtccctagcaccatgtagcatgaagccaagcccagagcaggggcccagccaatgttcattcagagcacaagtggagaaaaccagcccagcacacaagcacctggtgtgcactgcactccacagtttacatcctctacaccccctcatccctgccacttgtgcccagcttggtccttagagccctcttggtcatgccctttattcaggcgagccttggggaggggagattatttccctatggttgcatagccagtcggtgggatcccagagctctgtctaccacactagtcactttccaccacagaaaaagggggtcccatctcccactcagtccagaaaagccactccaccttggacaagaagaaaaaaaatgttagtgaccagcaggtggcagtgatggctccagtggggtgggatgcatgaagatagttccagagggttccatcaccttccaccccttacccccaacagcagacctctaggttgagttggggcttattagccagtcctgagcagcatcccctctaagactgccctggctaggggctgggtcccgaggaaaagagggcgcctcttccccagccagtccattaagtctgaatggtggcaggggtaggagtgttaggaggagcattagaaatcagcctgagtccactcatcattcattcactcactcactcactgactcacccactcattctttcactctctcattcattcatttactcattcacccctttcctttgtttattcaaatatttataattcagatgacagctcaattatcacctcctcagggaagccttccctgatttcccaattgaaattaacatcccctattcttcttactctacaacagtggttcttaaagtgtagtcccaggcccagcacctgttatcaccgggaaatttgttacaaatgcagattttcaggtcccacccaccttcatcaactgaatcagaaaatctgggggatgggcccctgcaatctgttttaacagcccaccaggtgattcgaatgcaccttcaaatttgaaaaccggccaggcacggtggctcacgcctgtaatctcagcactttgggaggccgaggtgggtggatcacctgaggttgggagctcaagaccagcctgaccaacatggaaaaatgcggtctctactaaaaatacaaaattagccaggtgtggtggtgcatgcctgtaatcccagctactcgggaggctgaggcaggagaatcgcttgaacccgggaggcggagattgcagtgagctgagattgcattgttgcactccagtctgggcaacaagagtgaaactccatttcaaaaaaaaaaaaaaaatgaaaaccactgatctacaaacatcactgttttcttcatcacactgacactcctgaaagtttcttggccatggtttgtttcttgcactctgtccatctctcccaccagcctgacaaccccccgatggcagggactgaggctgttttgctttcccccggcatctgtctggggactggctctgtgaacagacgactggatggaaggatatggtgcctctccactcagtgtctggtccagggctctgggcccagagggttgaggtggggatggagcagtcagggtggcccagatccttacctggggatggtacacaggtaggacagtagcttggtgacctctgaaactgtgcaccatggtgcctcccaggccccctctgtagttgacaccagaagcaggggccgcccggccctgtcccggccacctggaggacagagggcacacgtgagcagtgagaacttgtggggggccctctagggacctctcctgtggcctgcagacctttggccgtaacggttcctttgcctggaacaccctttctctccttctccttctgtgaactctgacttctacttatccttcaagacccagctcaaacaccacttcgtgagaaaagtcttccctgaatctcctctgtgcagagcactccctctgtataagatacgtgggcaggcaaagctcatggcatgagctctggggtcacacagaaaggggtcaagtctctgctctgcagtgactcactgtgtgtctgtgggcaagtcagtgcacctctgagcttcagtttcctcatctgttaaacagggagaataatatgctgagcttattaggttatttcaaggatgaaatcagacagctcctgagaagcacttaatacacagcaagagctcagtgaatgattgagttgctcaatcgttggtcgttacaatgatcactgtctctgttctcgtctccagtccaaggggtggtgagcgtgcagccctgtggccaccagcactatttcttcttgcagactttcaaccctgggtttccgacaggctatttcctgttccaggaatctgggcggtgtgcctcactctccccacaggagtcatgaggctgaggctccgggagccagtacagcccatcctcatggggaggaaaggggagggcaaatacagcagcagggaaagaggctcgggccttgggaaaccacacctgtctcgcagcctggactcagagccctgcacttcagtcacctcactccaggatgccctgcaatgaccaccagccactccacgtgggcaccaccctctgcagcgtgcaaaacccttcacagctcacgaagccttggacaaacctaaccaccttcacaagtgccgcctcacaggggtccaaccacctggaacattctttcacatatgtcttaaaatctgatataatttttaaaataaaaaaaaaatttgtggctgggcacggtggctcacgcctgtaatcccagcactttgggaggctgaggcgggtggatcacgaggtcaggagatcgacaccatcctggctaacatggtgaaaccccgtctctactaaaaaatacaaaaaaattagccaggcatggtggcgggcgcctgtagtcccagctacttgggaggctgaggcatgagaatggcgtgaacctgggaggtggagcttgcagtgagccgagatctcgccactgcactccagcctgggcgacagagtgagactctgtctcagaaaaaaaaaaaaaaaaatttgtgtgtatataaatgtgtatacatatatatcaatgttatcctcttgatattatggatttgatctttttcctactattcacttacaaatttcgaaagtaaagacattttgttggggataagaggggagacttgaacagaaactggaaattgattagtatgaggacattctttttcattttgttagggggccgggtgcagtggctcatgcctgtaatcccagcattttgggagaccaaggtaagagaatggcttgagctcgggagttcgagaccagcctgggcaacatagcaagaccttgtctttactaaaaattaaaaaaataattagccaggagtggtggtgtgtgcctgcagtcccagctgctcaggaggctgaggtgggagaatcgcttgagccggggaggttgaggctgcaagaaccataattgtttcactgcactccagcctgggtgacagagtgagaccttgtctcaaaagaaatttttttttatctgttaagtgtactaaatggtattgtgattattagggaacacactgaagtatttaggtgatagaatatgaagatttgtaatatttttataaatacttcagaaacaaatagatgaagcatgacaaaatgttaagatttattaaatctgggtgataggtatgtgggtattcatgatactattctgtctacttttctataggtttgaaatttttcataatataaaagtccaaaagaaggtgaagtcattaaaccatgaaataaatgcacaacttgtgaaggtggaggtgcgggtacaggtccctccaaaatcctatcgcagctgtttgttgggtcccttgggtcaggaaatgctacatcacatacctgggtccattttgctgatgaggaaactggggtggggaagcagcttcccagtcccccatgggctcaggtacccaaactctctgcaagggtagagaccatgcctgattcaccccttgaattaggggtgcctttgtctgctacacacctgaggcctggagctcaattgcagctctgatggtgctgcactcccctgctctataaccttctatggctccttgtggccttgaagagaaactgcaagcttctggacctggcattgaagtgtctcaggctctgcacactcttccatcctcatttcatacactaggtgttaggggcgaagctgtgtcccctgcccctccaaatttatatgtggaagtcttaactcccagtacatcagcatgtgactgtatttggagatagggtgtttaaagaggtaattcagttaaaatgaggttactgtgggccctaatagaatatggccagtgtccttacaagaagaaatttggacacagagggaagaccccatgaagatacagggagaagatgggcatttgcaagccaaggagagaggccacagaaggaaacaaccctgccaacaccttgatcttggacttccagcctccagacctatgagaaaatgaatctctgttgcttaagccacccacgttatggcagtcctgggacactaatatactaagtctccccttgccaccaatgacagatgataccacccagctttgttcaccctattccttctgccaggtatgcccttctgtcctatctctatctggtgaaatccccctcatcgctcaaagactagccaagatgccacctcttcctggaagacctccttactgccttccctctttagaagctcttccccagtcccaggttcccaaagcaaatgtaggcctctgtgagatcctgcaagactgagagcccttacgggtgtgcactgggtcaaactcattgttgcatccctgtgctcagcacaaggctggataatcaatgtctgtgattgattcatgaaggaatggagggttagagcaacacctctcaaactttgatgggcctggggatcttgttagaatgcagatgccagttcagcaggcctgagattctgcctctccccctagctccaaggtcacgctgatgtaggtagtccccagaccacactttgagcagcaaagggttcacacactcaggacattccacactgggacacagtagtcatacgattagttcacatgtctggttccccacactgcctggaacagggccctgcacacacccagtgccagctgagttgattacagcaaggggcagttgtccacctgatttgtcttcagctgggccaaggagacccttttgccccaaatgttatcctcacctaccagctggcgccagaaataccatcattagcatctcagaaccgtggcttgaagctgtgctgttcacagatattgtgagcctcaggtgaaaatgaggatggcaaaatgagggtggtgggtaagtcggggttgcccaaagttgctgaaaaatgtgttgcatctgccagcagcatgaagagtcactccaagtttggggagggaggaatggtaagtaattgaatttgcaagcaattaaaagcattttttcatatcaaaacgagtgtgaatgtattctatttatggatatttaaaatgtatagaaattttaaaggcaaaaaggatttcaaagatctatatggagcaactgagagctcagggtgaggtctcaatctcaggggctctgttcattctcttctgcattagggattttccagtggaaagacagggaagccctctcctaaggcttcgtgcctgtggccccaaagatgtccatgccctaatccccagaaccttgaatatgttaccttacatggcaaaagggacactgcagatgtgatgaagggcaggaccttgaggtggggagattatcctggatcatccactctaatcataggaatccttaaaagcagagaacttttcctggctttggtaggagcaaggtgccaagatggatggggggtgagggagatgcaacattgctggctttgaggatggaggaaggggccacaagccaaggaaagtagtggtctctagaagctggaaaaggcaaggaaatggagtctcccttagagcctccaggaaagaatgcagctctgcagacagctggatgtagcctagcgagatccatgttgagcttctaacatacagagcgatcagataatacatttgtgttgttttacgtcactaatttgtaataacttgttatggccacaatgggaaacacagtgcctattaaacaaaaccccatccccagcatgggagcagacattcacacctgcatgttgatcagtttctttcctgagaacagatctttatgaaaactttacggggagacctgcttcacagggctggcttggagcagatctagatcttgaagcacaggctctggggactgtttgccctataaggaaactccaacagaggccggtgtggacgcagagacaccagcgaggagaccactgcagcaggcaagagaccacgctggtttggacttgggtggggtgaagtcaacagattctgaatacaatttaatgggagagttgacagttaacaaattgaatgtgggatgtaagagaaagagcaatcaaggatgatgtggtcatcttttactgccatgaggaaagactggaaggttgggaagtgtggggtgaggggatgtgaagtcaggagtccatatttgggcatgctaagttagagatgtctgtgagacctccacgcagagacatcaagtagtaaacagctggatggataagtctggagttcatggccagggcccaggctggaaaaatcagtgtcggggttgtcagcctggagagagcatttacagaaaatattccacctccaggatgagatcgcctaggaagtgagtgtggatggagaggagaaagggaccaaggactgggctttgggggccctccaggatttacaggttgtggagatgaggagacaggaaaggaggctgcaaaattgtggccagtgaggtgagaggaggactgggtgactgaagatctaatggcaagtgaagaaagcctttcaacaggaggaagtggccatccatgccaaatgctgcggaagggcctagggtgatgaggactgagaatcgacccctggatctagaaacatggaacgcaatgacgaccttgacaagacgtgtctcagtggcacagtggggaagggattctgattagagtgagtggaagagagaaggtgtggaaacagggaacacagacaactgctttgtggagttttaatgtaaaagggtgagggtgggaacacgggggcctagaatagctcatttcaagctgggcaatattgcagcgtgttctcatcctgatgggaatggcccagagccaaagaggaaagatgatcctgtaggaaggagaagagaatcttgctggagggatgtctttgaggaggtaaagaggaacagagcacgggttcagggtcagcctcaggcacatggacaattcatccatactagaatgctgagcctgtgggtacagatgccagcaggtaggtgaatgaccttccttctggtctgactgagtaagcagaagcaattcatagacttccttccaattgcttctgcttactcactcagaccagaaggaaggtcatcagctgagatttaagttggggaaggtggtgttgaaggtcaaaggagagagaaggtgtgaagtcatcacacaggactgtgggggagtcattcaggactctggaggtgaagtaggatccactagcaccattgggacccccagaggtcagtggtcaggaattcaacacaattagcctgcacaattgtgtggatttttccagcttcgttcagcttgagggtgcaggtggagagttggatctcacggaggttgggatttatctgggtaagtgtgaaggtggaagaggaaagcaagcgagtgagtgtttgaaaggaagtgattacaatgtgagcctggaatctaagctaggaagaagggatgtgaggatgtgacagaaggtgggggagacataatgatggggaagggatgtggtggagagtgaggaagatatgatgatggggaagggatgtggtggagggtggggagacatgctggaaaaggggagtgaaaaggtggttgaaccaataggttcaaggttttgggaggcctgaagatgatgaaacttggggcagtgggtgacctggaaagagaagcagtggtaataaaggagagggagccttaacatgaaaacccggcggggagaagttggttacgggggatgcgatggggggagtcatgtggggaatgaggacaagatcactagagaagagcaggacaaaaaacggacagaaggagcacgcatgtggacgttgctcattcacacagcaaatgctttttgcacacatgctacacatcaggcatgtgcgagctaacagtgcatgttgcaacccccaagaattacaacaaaagtaactgagggaagagtgacagtgagccaggtcctatctgtctattctcctcctctcaaggaggcccagagagggcagtgacttctccaaggacacacagggagctaatgatagagttagaactaaaacaaaggtcaccttcctcccatagcagagccttccatggacaaaatctgagcccttggcccatgatggccctaagaggatcatgagatcctttgtgtacaattaatatggaacaaacagcaggagcttcagcaaagatgaccaggaaaatgacagataaggtctcctgggagctgcaaaaagacagggcagtgctcaaggtcctgaagagatatggaagtctgtgaagtaaaatagtatttcaggacaatcagtctccagaaagcactgtggttctcttgtctctggacctttgcacatgctgttccctttgtctggaacgccgttcccaactcttcacctggataattcctactcataccataggactgggctttacgttacttcctccgggaagtcatccttgacctctactaccctaagcctgaaccaggggactcatctgtgctcccacagccccctgtccttcccaactgtcacactttgtttacactgggtttcaataatctgttgtgataacctgttggcttttccccaccactagaatataggtttcctgatagcagagaacacatcagacttgttctcttatgaatcgccagtgctaagcccaggaaccagtaaatgtctgttacaacaatggggaaatattaaatacgagtgataagaccttctgtattggatgctgctagtaccccaaacccagatcccctcagcaggcagagaacccatccccagagtctgaaagtatcagttgtcagtggctcacagatgccccctctctgaagaagcactctgggctgaactggatcactggctccccctgccccaccccattccaggatcagcccgaagttcctgcagttcattaatgacggacagactggggatcagcccacagttaatgactgacagacaaggcttataaaaggccagtcccctacaccttcagctggagccagctctgtggggcgggtcatgccccagtgctctccttggggtcagcccacagccttgcttggctccttcccctgccttgaccctctgtccttctcctcagagccctcctccaataggtcactttcccaaaaatctatgtctcaggctctgcttctggggaacccagtatccaccttggctgcttcactgatggatggacaagtagacagatggacagacagatagatgggtggatggataccaacaaattgctttcatctattccaattctcccatgggaaagatgaggaaactgaggcccaaggaggcttggtctagaacctaggcctccagggcattccctgcctcccctccacccaacagcagctgaagatgctctggggcccccagctccctccctaccacctcctgcttgaatcccctggaacctggcaggcatgctatcctggagcggaaaaccttgacacctagagccccaatcctgggctcaggccctgggggctcctcctccagggtggggcctctttctggggagcctgcagaagcttctggcaaggcagccttttcctcagtcagtgggctgggggcagtggctgggccagatgttttggtctgagttgttccagctgggaaaaagcaacaacaaagaaaaggacgttaagcagaagatgggctttctaaggggaaaacgtctcctctttctctttctgactaataatagcttacaactattgatctctcccatgtgccaggcattgcgctaagccccttacttctagtgttacccctccccacacctcacttttttttctttagtgacagagtctcactctgttgcccaggctggaatgcagtggcatgaacatagctcactgcagctttgaactcctgggcttgaaagatcctcccacctcagcctcccgagtagctggggctaaaggcatgcaccacgaagcccagcttttttatttattccttccttctttccttccttccttccttccttccgtcttccttccttccttttttccttcttttctttctttcttgtaaattcctggcctcaagccacccaaattctcccgcttcagccaccaaagcactgggattacaggataagcctctacacctagcttctggtgtcgctttgaaccctcaaaataacactgtgaaataggtgacattcccattgcacagatagggagaacgtggactcagagaaactcagtacttggccaacgtcacacagccagtgtatggcaaaggtggagtgtgaactcaggcagttgtaacacagtcacagtgccttgctcaattccagacacatgagacttcaagccccttaacatgccacactgtatactaaacccctgaagctgagccagcccaggtggtctctatcacttacaaccaaaaccacctaaaatgtgatctcaaccagacaataacctccttgtacagctgagcatgtgggcatcttacctttccccaaagatttggctcggttgggtttaggagagtagagggaacacaggactttccagggcccattgtgctggagtgaggctttctccggggtcacagagggttgcctctgccctctcaagaatgagaatttgagcccaggagtggggggctcaggggaggaggtgtttctgctagggcagggcatgggcttgggaagtctcccatttctctctttggtcttcacctctatctttgtttcagaggctgcagctgcaggagaagctggggacaggcggggagaggaggcttgtcttggtccaggcctgagctgcaccatattctctgggtttcctagaggtccctgcatcttggaggcagctggctcttgtgagacacctgccctgagaccagaggcacagtccagtgcgtcctcaaggacattcatgtaggagccttggggcggcctttctgagttgtgggtgggtgctttaagattgacctttctcctgaagcccaaattatagggcctctcctcagagctttctggctttgtgcaagcccgatttcccaaggaaggtccttcattggcctctgagagaggcagtatcttttgaaataagggagtttccttagttccagctatctcctctagtgccccagaagtacacccactggatgtgcctgcctccctactgggagactctcctctgctctcttgggaaaagcctaggagagccacatagtctccctcgaagtcctggctgaccacctcgtccatcctgaaagccacctccccacaccgggcttgctccaccttgatgagtcctggatacttgctcccatatgtcctgcccttacccttggccaaactctgggcaggaagcacctggttgtctggggagctggcctggtgcaactcttgagggctgctcaaatccagtgcctctaatggaaggggcccccaggcttggcagagggcattcactacttggggtctgtcatccacaaactctgggctggttatcttggtccaaggcacaggggcaatcccattttctgatgctaccaagcagttgtgtaggggatttccctcaaagtcactgttgatggcctccagccattcttgggtgaaaagtatagggtaggctggctctggaacaggcttcttgtccactgtgcagaggtccagggagaggcatttgatcatgatgcagacagactgctcctcctggggctccacttggaggtagaagtcaccctggcgcaataagagagggttgaggggtgccaagtggaccacaacttcatccctcagacagagtggccagccctcgtgtaagaagaggcagtgtgagtagggagcctgtggagagaaggggatggcatcagagaacctggccctgaaaggctccacccttggatttgctcctttccctctcccacgtggaatctggaacaggtcagggactaggatgaggcagcatttaggaggcactcactgtcaaggttgtgcaaaggttgactctcctgccccaccctcgtcctggccctgaccttggaaatcctagcctactgacccaagtgagaaagctcagagcaccatgcactagttagcaatcggctttcccaagtggtccccttgcttggctcatgctcccttcctctctgcatctatccagaacatttcccaacccaattcaagtcttagccctccattttaaagccagggagacgtggtttagacaaacgtctatgttgctaatttgtgcaaattgcttaacttctttgagccccaatttccctatctgcaaataggataataatacatgtcagtattactgggttggtatgaggattaagtgagattatacagatggcctcaatttatggtggggttatatcctggtaaatccatcataaattgaaactatcataagtcaaaaatgcatttaatgtacctaatctacagaacatcatagcttatttagactagcctatcttaaaagtgcacagagcacttacatcagcctacagttggccaaaatcatctaacacaatgcctattttataataaagtgttgaacatcttattgaatttggatagtgtatgagggtgaagtagaaacagtattgaatgagaagtcaggaaatctgaccctgccactaacttactagatggctgtccagtttttcctgacccaaaggttattctgggcctgaatgtttattttttatttgtttgtttatttatttctcattaaataaatgaaggcttatttgtttattttttatttatttcccattaatggataataacacgaaggtgaagcaaaactttaaaaagaaatttttttttaacaggagttgccagaaattccctgtataggtgggtacagagggtcattctggaacaggctgtgacccaagtgatccctctcagttgagcctgtccactgggctgtgcgggaccagtgttcaacagtgacaccatgtggcaacaacggaaacaacagctccactgggctgacaacaggtctttaactggcttttggaaaaagagtctgagttctgtggattgagtaagtcccagacaatcttatataatttggatgtgtgtaggggagatgtacagagagtgagactgaatttcctgctaattaaacaggtgtttcctggaattattgattgcggaaatagtgagatctgaccatagttataccttatgttgataaacccatttatatcagtcatattgtagattgggctgcctcagagaagcttaatatccataaaccttcatgagtctgtaggttttctcgacccttttcacttagccctcttgggtttgcaacatgctttctctctcaccttctcattgaatgagaaaaaacagcccagccattttttgcaaacagcaaagcaccagagtgatgatggctttgctcatctcacttgactttcacagtaactcagtttgatgtaggcagtccaggcattattattttcattttacagatgatgcaactgaggctcagtgtggtgaaacatttggctcatagccacacagctgataagcatcagggacttggacctaggccttcacatttcaagtcagctgtatctgtccccaagccccaccagacttcatgtgaaggtggctgcttctgggtgatggtggctggagaggcagactttgaggctgccatgctcttatttcagatggagaaacaaggaagtgggatagcgatagccaatagctactgggcacttgctgcatgccagagtctttgctaagccatgtgttgtcatctccatgtgttgtcatctccatgtgttaggtgctgtgttattaacgtttctgcttgacacataaggaaactgaaactcagagaggtggcatggatctccaaagttcacagtgatgagcttggatttgaacctggggcatctgaacccagaagccatcctgttaatcacacatgacttcccattgctctgagattgacagatatttgcctatcattacaattagattaaactcacctacaaggaaaaataaagacgcggaaatgttgttaccttgaggaagcggccagtgcaaatgaagtttaaatggccaaataagggaagtgggcaattgtgtagcttgtcagggagaagaaataaggatgggggagcatctgcatgaaatagtgtcatgtggaagtggctgcaaatgcttccatgagaagctcccttcttctccaatactagttcccatgtattgagctatgatctatgagccaggctctgtgctaagcatgtaaaatagattatctcactttccttctggttcctaaccctggacttttagctgccacgttcaatttatttctaccactggaatgacgcacacagtccccacccttccttgttgcttctgatgagctgtgtccctgacaggcagtgggcaactcaggacaggctgatgggaccttagaacctctttgtgattcttgaggctgaggtagcaggagggtggatgttaataacaacagagcagggaacagtagggaaacccatgaagggaatggcaagttcctgtggtgggcatttgacggcttggtctcctcaggcttctctcatccttttctgttttttgttttttgttttttgtttttgagacagggtctcactgtgccacccaggctggagtgcaatggcgtgatcttggctcactgcaacctctgcctcctgggttcaagcgattctcctgcctccaagcgattctcttgcctcagcctcctgagtagctgggactacaggcatgtgccaccacgcccggctaatttttgtatttttagtagagacggggtttcaccatgttggccaggctggtctcaaacccctgacgtcatgatccacctgccttggcctcccaaagtactgggattacaggcatgagccaccactgccggccttctcatccttttcttaaaacagctccaccctctgaccatagaggtagacacgtgactcaagcttggccaatcctggtaccccactcctctggccacagtgattggtccaggaatgggcatatgacccaagcctggccaatcaggatccttccttgagatttttctatgtgcagtggatgggaaagagtttattttcctctctaggatagaatataaatccttgagcttccctgggttccagccttgtgggaacacttagcctggaagaataatgccaacaagcagcgcaaagcagagactagggacagaaaggatcttcaagggatttgatcagtggatcaacttgggcctgaggcctgatccacccttccctggtttgagtgaggattctgtcatttgcagccaatgagtctggctaaaacacttttctctccactttgccttggcagaggcctccctgagatctgagtttgaagaggtcacaggggaagaaagcaagagtcctgatgcctcaggggctccagggaagctctaggaccttctctgctatttccactgaagctgcctcacttcaccaaaggcacttggcagtgcccacaatgtcaggcgcagggcaggctccccaagaccagggagcccccaaggatgcctttactcaggccttcttctctgctggtgacagtacaatgtaatgaactcatagatgtcacaaggtaaatccccttcgatctggggggctgatgtctccccctgggcaagcaatgatacttggaaagtccccccacaccctcagctccccgtgaaacaagacacaggccagcccacctccttctctgcccgcctctagccccatgactttctggaacagcttgttccctgtccctgtttccctcttgacttacacaggctgcttctcgcacttgctcacacaggcgcttggcagggatcaggaaatccagaaggaagctcagcccatccccctggaagccagagtccaggagacggaacacctgacccaggacggtgggtgctgtggcctcgaaaggaggatagaggcccgccagggcatgctggatggctgtgtcgagggatggagggtcctgtgggggacaggaggagggggtgataatagcaatgataataagggcagagaccacttcccgtgaccttccaggccccatatgcctaaggcccctgctaattctctgacctcctctcctaccccacccccctcactcatcactgccagccacactggccttctttcctgtccctcaaacacactaggcacaatctcacctcggggcctttgcactggctgttccctctgcctagaatgctcttcctcaagacagcctcattcccacacctcttgcaggtctttgctcaaatgtcatctgctgatccacggagacgtggaggaataggggtggggggtgggcattcaggtcagggtcaaagggaaagaggattttggcattgccccagtctgaccgcctggctggcctgcaggcctgcagcctgaagctgagccacgagggaagcccagcccagaccagacagccccactccacatgcagatgggagagtgagaataagtgattgctgttttgccactgagctttggggtcatttttcacacagcaataactgatacaagtccacggctgcagactgtacagccagctgcctcccatggacctcctagatgcctctcagccaccaaccgccaacatatcagacccaacctggcaacttcccaaacctgctcctcccccagtcctacctcggtgatgaccccaccgcccagtcaggctcctaggccagaaatctgctcacagcactgcttctcctcctgcctcccaacccacaatcagccctcagtgtgtcccacaccacttcccctccaccaacagctctccagccaggtgctccgcgctgtcccctgcccccgccctgatccaggcttcaccgcctcttccaggaagggatccagaaggcagtcagcccgtccccctggcagtcagagtccagaagagggaaaactgggcccaggacccaggatcacctgactcctctctttggctgccaaattctcgtctgcctcaccccagccattttccaccaggaccccagagcgacctttctcaaatgcaaaccagacctcatcagtctctgctccaaactcctcaaaggttcccaccgtcttcaggaagcatcagcctccaggcatccagctcccctgagatctggcagctgccctccgcccccgcctcccctccagcctcgccacccctctccatgcttcggccacagtggcacatgccttcccttgctcacctcgaggccaccgcacatgcagtggcttcctgctggaatgcccttcacttccacccctcctcacctggccaactcctcattcaagactcaggtcagctgtcaactcctccaggagattttcttgggtgcccccaactaccccagggagatcaggtgtccccttttctgggatcctatagtacccctattacagcggttcccatctaaaggcaggtgtaatgggtagaatgacctccaatgacgccctcatcctaatctctggaacctgtgaacgtgctgttacaagacaaaggggagttaaggctaccaatggaattaagtttgctaatcagctgactttaaaacaaggagaccatcctggattagacaaatgggcccagtgtaatcaccaggtggaagaggatgcagaagagggaagggtaagaggaaatgtgactatgggccaggggtggtggctcacacctgtaatcccagcactctgggaagctgaggtgggaggatcgcctgaggctaggaatttgagaccagcctgggcaacatagtgagatcccatctcttattacattaaaaatcgtaaataggctgggtgtggtggctcatgcctgtatcccagcactttgggaggctgaggtgggtggatcccttgaggtcaggagttcaaggccagcctggccaacatagcaaaaccccatctttactaaaaatacaaaaaagtagcccggtgtggtgatgcatgcctgtaatcccagctactcgggaggccaaggcatgagaattgcttgaacctgggagatggaggtttcagtgagccaagatggcgccactgcactccagcctaggcgacagagcaataataaataaaataaaataataaataaatagcggaaatatgacaacggaagcaggatcagagagatgtgatgttgctggcttggaacatagagcgggagccaaggaatgcgggcgtctcctagaagctggagaaggcaagcaaatggattctcccctagagcctccagaagagaaatagccctgccaagactttgtttttggcccagtgaaatgcatgtcaggcctctgatcttttattacctgcaaggtactatacttgtgtagcttgaaactaaagtgcatgatcatttgctacggtggcaacaggaggcaggtacagtaagcactggcttcttttcctctttggggcctcggtgtctgcacaggaccaggcacaaacaggtgcttcataaattttatggcagaagaaacaaaatgtccctctctgaatcacaatttttcttttccttttcttgtcttctctttattattattattattattattattattatttttgagacagagtcttgctctgttgcccaggctggagtgcagtgttccgatctctgcttgctgcagcctccgccttctgggttgaagcgattctcctgcctcagcccgagtagctggaattacagggatgagccaccgtgcttggcctttttgtttgtttgtttgtttgtttgtttttaaagacaagatcttgctctgttgcccagactggagtgcagtggtgctatctcggctcactgcagtcttgacttcctgggctccagcaatccttccacctcagcctcccgagtagctgtggaccacaggcacccaccaccatgcctagctaatttttgtatttttggtagagatggggtttcaccatgttgcccaggctggtcttgaactcctgagctcaagctagccacccgtctcgccttcccaaaatgctgggattagaggcatgaaccaccacgcctggtcagaaccaccatttttctgtcaaatagacaagttggactaggccagaggtttccacccaggtatggtcttaggacccataggtcatgagcctcacgggggcccttctggttgccccagcctggttgcaagctccaggtccacctgttgcccaggggggcaaagggagatgagaataaataaggaccccactcaaagggagcttacttaaggagggaaaaatcattttagtaaatgaggcccctgaagaaagagaaatacaataggaactctgaggaggaggagggtggcatttctcaatgccagcaagattccaatgccaggaggcttttacagaggactgaggctccctcccacccgtagcccacacagtgctgggcgcaggggaccgccatcactatttgtagaatgaatgagtgaatgaatgagtgtccacagcccattgtgatggaaacagggtccgggcactgccgtggcagtgagctcagagaggatgatggaccgacaggcatctggtgctgaaatcacatgtacccaggaggttttacactgaggtggagggaggggccttcaacttggcagaacagggaaggtctcatctggcccggtgtcctcttctaatccccccccaacccccaccaatcatggtcaaactctgacatttcccaccccatgcaatcctgggagcagtcccttcccctgccaggtgccctccccactccctccctcctctctcctgagacttgggctctggcctctctgttgagacgttggctccagcctctctgtgcagccttgagtaggtcctttccctctctgggcctctttccttgtgtaaagaaagcatattgagctgggctaagcttgatttgttttggttttggaaatttaatcattcatgatgacttttatgatgtttagcatctcctcataccatgcatactattagcacttactatttttcttcaaatccactcactttttcaaaacttacataattgtgtttttcaatgagactctgtatcatcacagtggttatgcaagtgcagccagactgcccgggttcaaactctggttctgtcacttactggttgtgtgtacctggcaagtcagatttaactcgttgtgcctcagtttcctcatctgtaaaatggagactgtaattacacccaccttaaggagttgatcaagattgggtgtattgaggtaatacatgcgaattctctgcacaggactagaatttagtaggtgctcattaagtaagagccatcactacaatttctgtggtcatattattattattattattattatggtgtgtgtgtgtgtgtgtgtgtgtctgtgtgtgtgtgtgtgtgtgtgtggttttaaggagcagaaagtttaataggcaagaaagaaagaaggaagaagaaaacagttcccctgtatggagacagagggaggaggattctaacaaagagaaaaccccgtgtgctgcagaaaagtggctgcttctacgaggaggttggaggagatggtgtctgatttgcatagggctcaagggattggtttgaccaggcatgtcactcatgtagcccacgaaaaaactggccctactaccctagctttttaatatgcaaatgcagggcgccatgatgttctacacaggtggggatatgtgggggcggccatgttaccaggcacatgtgggggcaagggcaagaagaagaaggtaggaatcaccatgtttgggtggatctgtggcaatattataactgttattacatcatcactataaatggagaaataactgtaaactggcataaatcgaatgtaactccaaaaataaactgatgatgcattggatggtttttgtattatttcatttattaaaatatatttaaatatattacttatataaagtatattttttgtttactgtttgtatttctgtgaaaataaactactttaaaaaataaaaataaacaatgaaaacgaatagtaccattaaattctagggacatctggtcacctcttggagcctaagggggtcttctccctctctttctcccaaatgcatcagagagatgttaaagacatcttatccccagaggaagtctttctccttaggtctggagaagctcagggaatttgaaagggactgattgtccatcacatggttccatgtcatttagttccagtctgtgacataccttgtgtctaaccaggcccgcattcctggcccctatactatgctcatgaccttctggactgacccagggaaccttgtagtgcagagggacatagaaaactacctgctcacagtggttatacctgggcaatggagtgggggtggggggatgtgtatacttctatttcaatgtctttgcaatgagccactgctattatagtcttttttttttttttttgagacagagtctcactttgtcacccaggctggagtacagtgatgcaatcttggctcactgcaacctccgcctcccgggctcaagtgattcttctgcttcagcctcccatgtagctgggattataggcacccaccaccgcgcccagctaatttttgtagttttagtagagatgcagtttcaccatgttggccaagctggtcttgaactcctgacctcaggtgatccgccctcctcggcctcctgaagtgctgagattacaggcatgagacactgtgcctggccccattataatcttaagtatcattttcgtcaagtaaaataaacaaatttaaagggcacaggttgatgcctttttaacctatgtatgagcccctgtaaccacttacccagatcaagagacaaaagagctccatactccagagagaggccccttgccagttgtctatgtcatcactgtggtctgcatcctaacctcagggaaacagtgagttaaactatctttccctgatgtgcctcagtttccccttctgcacatagatgggattctgattcctatcctacctcactcagatgattgttctagacacacaaggagctaattaatggatgtacagggtcttggggaaagtcaaaggcatggccgctgctgttattgctattcattcttacttattttcactcatcctgtcagcccaagcttaagtcccagcctctgtgtgaagcatcccccatctcctggtccctccctgtgtccactactgtcaccccaatgataacaacagtctccaggcggctactgtgcccaggtcccctacttgcattctcttgcttagcccacacaacgatgccaggagccaagtaggaatgacccgttttgcaagtcaagaaaccgaggctgatcttgcccaagaccgcacagaagagaaagacagagccaggatccaatccagattggggcctgccaagtctgcccagatcttcccctgtttcctgccgccccctctgcctggggaccaccagctgtggggactgacgatcccagctgcctgtccttcccagtttctagtagagcctgaagaaactgtttacctctcacagagcaaggctcagagaccgggacacccttagctttcacaaattggcttggtttgccacacactgttaccatttaaggggcagccagtaaaaaggaagtatgttccgagttaacagagctccgagctcttggccagcacattacccactacaggcctgaaccccaggggctcataagccatccaagtattggaggaagcacactgtggtgggtgtgggggtgcccaggcggctgcaggaaggaacgctagccactctcattcccaatccacccggcagcccagcctgggaccacaggaacccaaacaccagacgtgggcccctcagcatgatttccatgaaacttaatagatgtgtttccattccttcccagtgaacacagcccgcagcccggcaggagccaggctgttcccaggcaggagccagcgggtgtgaggctgaaaaggaagaaggtgagacgagccacagccccctcccctgcagcccaaggtcagagaaggagctcatcaaggggacaggcagaaccaggcccgcactgctggctcctataccatgctcacgaccttctggactgacccagggaagcttgcaggttaggagggactacttgctcacagcggttataacctgggcaggggagtaggggcgtgcgtatacttccatttcaatgtctttgcaatgagctgctattattataatcttaaataccatttttatcaagtaaaataaacaaatataaaaggcataggatgatgcctttttacctatgtatgaaccctgtaaccacttacccagatcaagagacaaaagacctccaccactccagaaagaggccccttgccagccaactctcccacccctgactattggaattttttttaaagaaaacagtgtcataccgtatgatctatagtatgaataaaaccatgtaagcctagaaaaaactccaagtggacattaagtaaagtgttaactgcagttacccctgagggctgtgcggggcaggggcctcgtaaggcagccttttaattttcttcatagtttcccggattttccaaacattccgtaaccagcttgtatagcttttataattaggaggggaaaaaataaaagtgtgagagtatgtgtttttaaggctggttccctttgtaaatggtctcaccagatgttgttagctggactttctgagatgtggattaagcttttcttttcttttcttttcaagaaagagttttgctcttgttgcccaggctggagtgcaatggtgccatctcgactcactgcaacctctgcctcctgggttcaagcgattctcctgcctcagcctcccaggtagctgggattacgggcacctgccaacacgcccagctaattttttgtatttttagtagagacagggtttcatcatgttggccaggctggtctaaaactcctgacctcaggtgatccacccaccttggcctcccaaagtgctgggattacagtcatgagccactgcacccagctggactgagcttttcttaaaggtccagatttatccatttactgcaacgggcaaagattttagtatcacttagcatctgccgcctccttacttgggaagagaggactgagaaaagccaaaatggacagagtcctagggctaccttcaagctctgccctgttccttggggaaaaaaaaaatgcctagggagggtgagattatgcccctgactctctgggtgatcctggcctcagtttccccacctataaaagggaggcactaagcatatctatctccaagggcccttccagtaggggcattctagaattcaaagtataatcaggggccgggtgcagtggctcatgcctataatcccagcactttgggaggctgagacaggaggatctcttggggccagaagttcgagactagcctggccaacatagtgacagcctgtctctataaaaaataggaaaacttagccaggcatggtagctcatggtagtcccagttactttaggcactgagacagaaggatcgcttaagcccaggaggtggagactgcagtaaactatgatcacaccactgtactccagcctgggcagagcgagtccccaactccaaaaaaaaaaaaaagtataatctatttcaggaaggtttggagctgggatgtggtttctgaatgggatcagttaatcctcagttggtgagaaggtttaaaaagatctgtcttggctgggcacggtggctcatgcctgtaatcccagtactttgggaggctgaggcaggcagatcacctgatgtcaggagttcgagaccagcctggccaacatagtgcaaccctgtctctactaaaaatacaaaaactagccgggtgtggtggcgggtgctgaaaatcacagctactcagaaggccgaggcaggagaattgcttgaaactgggaggcagaagctgcagtgagcagagattgggccactgcaccccagcctgggtgacagagtgagatctgtctcaaaaaaaaaaaaaatctgtctcttccatcttcctgcctcaggcctagggagagtcagtctaaaccaacagccacaggtataaataagtgcttccaggggcctgacaggtaacatgaagacagacactggctgagtgtgagaaagcactcacttccaccctttggagatagtcagcctcagcaccagggaagcaatggggaatagaggggcttggggcacacaccccctctcatcagcatcagctgagtgttgctttggcccagcaccacctgatctactgatttttcagtaaaacctcccaattttgaaaaagttggccaagccaaacacatctgtgagccagatacggcccagcgggtgtcaggttgtaatttccagtctcaatgacctgggacactcgtcctgaacttctccaggctggagattctagaaccagcattctgtggctctggctgccaggaagttcttgctcacttccaactaaaacttctgctttaagtcctttttatttttgtgtgggtggaggtatgagtgagtattggctcgtataaaaaaactttcagaaactgggaaaacagccctgatgcagtgagccgagaagcaagtggctgtcagaagacccacgttatagtccagctctgtctgtatcatctgcatgacctcgaccccctgcccctcactgagccttagttttgtatttgttcctttctctccctctccccttttcctctgccttgggctcaccatctcccacccaaaccacatcatgatcacaattgtaaccagagctgcttcctactgtcttgtgtgttaggcccctgctaagcatttttcattaactattttatctcaataattctatgggctgggtatttttattcccattttacaagttaagaaactgagctcaaggctctactgctactaaatggtagcactggggtatgaccctgggcacataaccaccagctgtcctgtctctttccccgggctccctgctaccacgccaggctcctcttagtcatcatagtgggcttcctaacacagagatccaactgtgaccctccactgctcaacaacctcgggtggctccctattgccttagcaactcactggtctggtgctgtggcccgtcagtcagctcccagcttaccttccctacttcttctaaacatactttatgctgtagcccaaggctttccaatcatcatgggcccctttcatgaggttctttctgccatgttcacatattctaatttgttattggcttactcttttttattaattattatttacttaacgtttgactttttgtcaattctttttcaacttaaatctattttttggctgggtgtggcgactcatgcctataatcccagcacttttgggaggccaaggcaggagaatcgcttgagcccaggagttcaagaccagcctaggcaacagagggaggccctatctctacaaaaaataaaaagttagctgagcatggtagcacgcacctgtagtcctagctgcttgggaggctgaggtgggaggattgcttgagcctgggagatagaggctgcagtgagctatgatcataccactgtactccatccagcccaggtgatggagcgagaccctgtctcaaaacaaaaaattatttatatttattattatgtgtttgtgctgtttaaattccttcctaatactcattaagatgaaaagctgtaaactaaaaattgttcatctaagtgccatctaaaatctcccctcctggaacctttggtggatgccacatcttggaaagtgctgcctggacacacatctgtgtctctgcttccactgccccactccctggactgagcaacctcctgcccacccttcagagcccttccagacttgcttctcttctctttgcttttcaggacacatgtgcttccaggcagaaggatggacccccaccacccatcagacacagcctagaattatctgtggatgaacctgccttctccatggactgccagcccccaaagcaggaaccacgtccttatagagggcctggcacacagtagggaactggggtggggtactgccatgcagcaggtatgtgggcaatgttgaatggattaaactgaacttggctagggtggtggctcatgcctgtaaaccgagcactttgggaggttgaggtgggaggatcacttgaggtcaggagtttgagaccagactggccaacatggtaaaaccccatctctactaaaaatgcaaaaattagctgggcctagtgtcacacacctatagtcccagctacgcaggaggctgaggcatgagaattgcttaaacctgggaggcagagattgcagtgagccaagacagtcccactgcactacagcctgggcaatagagcgagactccatctaaaaaaaaaaaaaaaaaaaaaacctgaacgtgaccagtttttctcacaggtggcccacaaaacaattttgggagaacatagattgatgtgaaatcacagcgagaaagttactccagttctcttccattcctcacgatgacaccaaggacaatacctcagtctggagccagtctatctcgaagacctctcaggcacttactcatcactctgtttaacaaaagaaaacagtcctcgggcttgaaattgttcaccaccaacctcatccagccagaatttactaacacagatttgccttcattgagtacatatttttatagttacttttttttttttttttgagacaaagtctcgctcttgtcctccaggctggagtgcaatggtgcgatctcggctcactgcaacctccgcctccggggttcaagtgattctcctgcctcagcctcccgagtagctgggattacaggcacctgccaccatgcccggctagttttttctgttttcagtagagacggggtttcaccatgttggccaggcaggtcttgaactcctgacctctggtgatccgccagcctcggcctcccaaagtgctgagattacaggcgtgagccactgcgcccggcttagttactttctatttatgacaatggatactgattttttcatggttgtgatataaaattttctatttaaatatatttttcagtgtacaaagtaagttgatttaaagaaaaatattgagcaaataataagtagtagattttatcattttcttatatattttatccagtaagtggatgtgtaaaagttgtttcagtgatactaacatttgggaaccatgggacaggatcaaccctaagcccctttgccataagattctctgacatgggggtgcccccaaacactagacagctgttaatcaaatgccccacaaaaattacagctatgatgggttatcataaaggaaagatacatgacatgctagagtaagagtcagggaaatcagggaaggctttcctgaagaggtgacatttgggtgaagatttaccgggtaaataagaattcattaggtgaaggtattcctccaagcaggaacagcatgtgcaaaggccctggggcagcagggagcgtgaaccataagaggctcgcaagcaaggctggagtggctggagcacagaagtgaggccagggaggtaggctggcaacaacctttattctttaaaaaacaggcaagggaaggaaatctgcacattgttcccaatctggaaagagttgctcaccctttgacagggggcagaccagtgcctgacccttgatctgaggatctggggttcaatgaggggtttctaatgactaggttaggtgtgaaagcaggagaggcttggcaaacaccaggtgcacgctgtggccctggagtgaccatgaccgccgagtgcaggctcagaattcagactgtcctaacttgcactttctgggtggggtgaccttgggcagctacttaagttcccagagcctgaggtccccatctgttggagatagccgcaggtctaatcttagagttggtatgagttactgactcctggatgtaaatcacctagcacagggccttgcctgtagggagaggtgaataaccactggcttatgagagtattttcaaacagctccaagagccatgtgtgtgtacacctgtccccgcagtgcatggatgtaggtgcccggttttgcaatatgtctgtggtgtgtatgccaatgtatgcccatagtttagcagtatgggggagcaggtgcagaaggcatgggtgtatgagagggtgtgaacatgtgttcagctgtgtgagtcagtgggagcattcaggtgtgctctgtgcgtgcatgtgtatgtgtgtgtgcatgtgtacgtgtgtgtgcatgtgtacgtgtgtgtgagtgcctgcgtgtgtgtgtgtgtgtgtgtgagagagagagagagagagtatgaacacctctatatggaattcttctgcttgtggagatgcatttgctgtgagtgaaaacccacacaaattcaacatggttggtcacagtcacagggttaaagccttggcctgtcttcacagcttttttcaaaatccttacagcccctgtgaatctgcctggggctcttgtatctgtctggagctgggctgaaatcctccaaaaacagacttttctttcattccctgttgccagatactggcacaaacgcatccctgccaccaccaccaccacacacacacacacacacacacacacacacacattctcccagaatgtctcaacttttttcaaggttccagctccaaaagtcccttcctcttccctctccccagccaattcccatggaagcaccctgggtttcaatgtgtatatctgactttccatagctgagtctaaaacagcaaaagcatcccaagttttggtaagcagttctctccttttcaccctggacccttaaccctcctcgccctgcactgcctggctggcctgggaggggactttaacccccaccaccactcttccccatccaaactccctgccgggacaatgtgcatatcacagtcagttccaaaacaaacatgcaaaaccaccccgtttcagccctcagcctcagggctgagattcaggctcaggtctaggggttggggaatattaaagtttacaagtacaatcttactccatccatacacacacatggagaagccaggagaggacgcggccagagatgggctcctgcccttgaacccctgctggggtggaagcaggtaagcacaaccctgccaaggcactgagggtcgtctcagtgtaaaaggccagggccacccggggctgttctgcagggaatggggagggctgtgcccactgaaagggggcagagcgaggtggtccaggccttggcgcgttaccatggtgacgggctgccagcggcgggcggcgcggctcctctcctgggcgcggggtctgtgggtccgcgggtccgtctgtctggggcagccctcggtcccgcctagccctggagccaggggatagggcaggcccggggcaccgaccccggcgtcatctcggaggagcggccggggaggacagggagagagactgagagagagacagagagggactgaggctggagacggcgagagacataagggagccgcgggcggcgcgggtcgggccaccagacggggggcggcagcagaggcggggcggggcggggcgcggcgggacagcggcccctttgtgcctgagccctttgtgcccagcccgcgcgccccgcccccaccgcccccccttccctccgtccaccccctcagcagccagctggaacccgaggaacccgagtccgccccgccaagttttcctccccgctcctcgctcttcccacggcgcacccggcccggacagccccattgtacagacccgcagagcgaggcctcgagccgcagcagccgggttaagcgcccgcggacctcgctggcaggcccaagttcgagtctcctcctcctacacttcccagggagtcacagactctcttaagcttcgatttcttcatctgtaaaatggggtgggaggaggatgatgatgatgatgatgatgatgatgatgatgatgatagtgcctgctgcttagatttggtgatgaggagtaagcatctgtcccagcgcccttgaattctcccacattatgccccatcatgacggcctaattcaaggctttgaggtgatgatggctgtgtgcgagttctgttcttgactctcagataatgaccttggccaagtcggtatttcctactgagcctcagctttggagtgagactaagaaactagatgaccgctagggtctatatgtgtgtgtcccctcccaaattcgtatgtccagacctaatcctcagtatgatggcattaggaggtggggcctttggaaagtgattgggtcatgagaggacagagccctcacgaatgggattagtgcctctctctatatatatatatacacctacatatatatacctatatatatacatatatacacctatatatatacatatatacacctatatatatacatatataggcactaatatgtataggcatatatacacacacatatatatacacacacatatatatacacacatatatacatatatatacacacacacgcacacacatatatatttgagatggagtctcactctgttgcccacccaagctggagtgcagtggcatgatctcagctcactgcaacctctacctcccaggttcaagcaattttcctgcctcagcctcccgagcagctgggattttaggcacccgccaccacacctggccaatttttgtatttttagtagagactgcatttcgccatgttggccaggctggtctcgaactcctgacctcaggtgatctgcccacctcaccctcctaaagtgctgggattacaggcgtgagccaccatgcccagcttagtgcccaagaggccccagagagctagctgccttgccccttccaccatggaaggacacagcgagaaggggctgtctatgaaccagaaaggcccagaaacataaggtccagaaagaaggctcttaccaaacacccaacttgcttgtgccttgatctagggcttcccagcctccagaactgtgagaagagaatttctgttgtgtataagcccctcagtctaaggtatgttgttatagcagcccagactaaaacagtgaccaaagttattcctggttagatggctcagggttttgtccatttatttatcaaacactgtgcactgagtcagcctgtctcccccactagactatacattacttgagagtcccggccctcaagtaatgtacagtctagtgggggagacaggcaaggagcagataaacaggaaaaataaaaaaataataactgtggtaactgctaagaaggaaacaaacaaatgttgacattgggaacagtagagggatcaacttatagctggtggtctaggaagcctgggtctgaaagcctagatctgaaaggggaggaattagaagagtggagatggggagacgcagaggaaccaagttctaagcagagagaaccgcatatgcaaaggctctgaggcaatattaagcttaaaggagctggggagtaagtgaagaactgaaaaagacgagtgtagttgtaagggttagagttcagacccaagccttattcacagcccatctcccaccccacataggttaatcagtcttttagcagagaaaacctgaattaggagccatcctatcccaacttttgataagttccttcacatccccgaccttcacttgcttatcactaatttgggactaataatcccctgcaatatttccacagcccagcaatcaagtaaactctctctacaggagatggtctggatggttttagtatcatgactccagatgtgaatttaggagagaacagacttgatgttcagtacagaattccactgagagttgtggggtcacagcttgaaggttttagagtcccaggttgccatgagacagaattgacatgacagccagcgttctggggttgcaggcaacagaagcggattctgagttaattaagcagaaaagaatggattggcagtcagagaatcaatgcgaaggctggggcctatcctctggaaagcactggagtaagtaggatgctctggggggtctcgttatcggaaagagttggaaacgtttgaacacatggaattacattaagacaaacaaacacaccaaagtagaactttatatgtgtcaggtagttttctaagtatataacagttatgaagtagattctattattgtcctcactttacaaatgaaaaactaaggcacagagagggtatgtagcctgcccaatgtcagatagctagtaaactgtggatttcagaattggacacagctatccaattccgtaagttatgttattaaccactttgctatgctacctgcataaatcctaaccattctctctgcccttgtgttcctcactgatggactcagaaccttaaaagagccaggcatggtggcatgctcctgtagtcccagctacttaggaggccaaggtgggaggatcacttgagcccaggagttcaaggctgcagtgagctatgattgcaccattgcactccaacctgggagacagagtgagaccccatctctaaaaaacaaacaaacaaaataaaacctttatagagaaattctaattgcgtcatgtgcccagggcctcactaagactgcacctacacatatcaggaatagttggtcacccaaaaggaaattaaattgcataagaaggagaagaaatgaatatgaaattgtccataaacaagtgcaattacagcctgggcacagtggctcatgcctgtaatcccagcactttgggaggccgaggtgggcagattgcctgagctcaggagtttgagaccagccggggcaacatggcaaaaccttgtctctactaaaaatgcaaaaaaataaccaggcatggtggcgcacacctgtaatcccggctactgggaggttgaggcaggagaatcacttgaacctgggaggtggaggttgcagtgagcagagatcacaccactacactccagcctgggtgacagagtgagactctgtctcaaaacaacaacaaccaccaccaccaccacaacaacaaaaaggtgcaattacggtctatccattgggcctctcaacatactttatatccttgttcacaggcatgttcttccaaaactcctctctactgatgtggtatagcagttccatatgcaaccaacaatgtgcacacacacatacacacacacacctctatggtttgtagtcatactgtgtgtgacctcagggaggttcacttttctgagcttcagaatcgtcttttgtaaaagatgggtaagattcgtcatggggaagaataaataagttaatgaatgtaaagtgctttgcactgtgtctggtacatagaattaacatgcgtcatataaaatagtgctgttattccaaaaaatagggaggagggaatacttccaaactcattctatgaggccagtattactccaataccaaaaccagacaaagacacatctaaaaaagaaaactacaggccaatatctctgatgaatatggatgcaaaacttcttaacaaaatactagcaaactgaattcaacaatacattaaaaagatcattcatcatgactaggtgggatttatctctgggatgcaaggatagttcaacatatgcaaatcaatccattctgttgtgatacatcacatcacatacatcacatcaacagaatgaaggacaaaaaccatatggtcatttcaatcgatattgaaaatgcatttgataaaagtcaacttccactcacgattaaaaaccctcaaaaaaccaggtatagaaggaacatacctcaacataataaaagccatatataacagacccacagctagtatcatatggaatgggaaaaaactgaaagcctttcctctaagatctggaacacaacaaggatgcccactttcgccactgttattcaacgtagtactggaagtcctagctagagcaatcaggcaacagaaagaaatacagcgcatccaaattggaaaggaagaagtcaaattatccttgtttgtcgatgatataatcttatatttgggaaaacctaaagactccaccacaaaactattagaactgataaacaaattcaataagattgcaggatacaaaatcaacatatgaaaatcagtagcatttctatatgccaacagtgaacaatctgaaaaagaaatttaaaaataatcccatttaaaatagctaaaaataaaattaaatatctaagaactaatttaaccaaagaaatacaagatctctataatgaaaactataaaatataaagtgaaagaaattgaagaggacaccaaataatggaaagatactcccaaagcaatatacagattcagtgcaatccctatcaaaatatcattgacattcttcacggaaatagaaaaaacaatcctaaaatttatgtggaaccacaaaagacccagaatagtcaaaactatcctaaacaaaaagaaccaaactggagtaatcacattacctgacttcaaattatactacagagctatagtaaccaaaacagcatgttactgacataaaaacaaatacatagaacaatggaacagaatagagaacccagaaacaaatctgcacacctacagtgaactcatttttgacaaaggtgccaagaacatacacaggggaaaagatagtccaataaatggtgatgggaaaactggatatccatatgcagaagaatgaaactagacccctatcttttgccatatacaaaaatcaaatttaaatgaattaaagacttgaatctaagactttaaactatgaaaccacagcaataaaacattgggggaactctccaggacttcggtctgggcaaaatttcttgagtaatacccaacaagcacaggcaaccaaagcaaaaatggacaaatgagatcacatcaagttaaaaagctcttgcacagcaaagcaaacaatcaacaaagtgaaaagacaacccacagaatgggagaaaatatttgcaaactatccatctgatgagggattaacaaccagaatatataagaagctaagacaactatatagaacaaaatctaataatttgattttaaaacatgcaaaaagatttgaatagacgtttctcaaaagaagatggcatacaaatggcaaacaggtatatgaaaattgctcaacatcattgatcatcagagaaatgcaaatcaaaactacaatgaggtatcatcccaccccagtgagcatggcttttatccaaaagacaggcaataacaaatgccagcgaggatgtggagaaaaaggaacccttttacgctgttggtgggaatgtgaattagtacaaccactatggagaacagttgggaggttcctcaaaaaactaaatatagatctaccatatgacccagcaatcccactactagatctatacccaaaagaaaggaagtcagtatatggaagagatcatctgcactcccatgtttgttgcaacactcttcacaatagccaaagtttggaagcagcctaagtgtccatcaacagatgagtggataaagaaaatgtggtacttacacacaatggaatactgctcagccataaaaaagaatgagatgttgttatctgcaacaacatagatggaactggaggtcagtatgcaaagggaaataagccagacacagaaagacaaacatcacatgctacacttatttgtgagatctaaaaatcaaaacaattcaacgaatggagacagagagtggaaggatgtttatcagaggctcagaagggtagtggtggggggtgggggtggggggggttggttaataggtacaaaaacatagtaagaatgaataagacctagtatttggtagcacaacaggataactatagcaaataataatgtaactgtgcacttcaaaataactaacggtataattggattgtttgtaacacaaaagacaaatgcttgaggggatggatactccattctccattatgtgattattatacattgcatgcctgtgtcaaaacatctgaagtgccccataaatatatacacctactatgtacccacaaaaattaaaatgaaaaataaaaatagaataaaatagtgttatgttaggggccgggagttgtggattcaccctccaaatacacaggcttaactgttggactggacttggttcatctctctgggactttccagtggatcttccaaggacttcaagcattcacttccttcctctctctctctggcaaatgaataactgaatcatgtgccaattgctacactaaattttgagaaataaccaaatccatcactagtcttacatatatggtggagtgagaaaatggggaagggctgtggaaatgggctctgttactggttcgctgtgcagctctctgcatggggccacagtttcctcagcataaaatggtgattatataatctctcctcatgaggctcttgtaagaatccagtgaaataatgcattgaaagggtttaacacagtgcttggcatataacaggttctcagcaaatggaagctctgcctgtgattttgagatttccaggcctaagtgccaggacacctcaccaggggacatgcttacttggaggaagggagttgcctaatttaagcaggatgtcatgggattcagaatgcattcattcaatcatttaatacatatttatttgctcctagtatgaggatgctaaatacttggcaggtgtgcatatactcatccctcccatacccatgacagatgtcactaatccatcatggaactttctgctgaacctagaaactgccccagagtcctcctcaatagaaagtgcaggcagctgctaccaatcaatacatgttgacatgaagacgatgcttattcaccatctgaagttcacaatgtatgaggaaatgggctccagaggcagaagcctccagagacagaaggcttgggtttgcattttgccataggtccttatgataatgtgtaggcactaaaggagcgtatcagccttggagtggaccactcagatctcccttcaagacagagtctgtgagctgcagatgtcttcaggatctgcttcagcttttgagctgaggccacctgcttcctgggcagcctgcagctaaacacactgtgaatgaggtttcgttatttctgcctaatataggatttctctatgaataatctttgtgccagagtcccctgttgggctggccaagaccttctcagagctgcgccacagtctgaagctcttgctacccaatccttcttcattccccctctcctttcctagtcagacctgcgtcaacatccaaaggctccccttttttctcctgctccctctccccattatcctttgcaggcattacccccatgcatctcttggcattcttaactctgtctttggcctctgtttctcagaggacacaggtgacctcagcactgagctgcagaagactgggctggaaaggagtggtcctcatcttctctgatggggagaataggggtggcacagaggttattgtgagtgctaggggcaaagagtgacccagaacagggaggctgaagggcacctccctcagcacgaaattggccttccctatcaagtactctttttttatttttgagacagaatttttgctcttgttgcccaggctagagtgcaatggtgcagtctcggctcactgcaacctccacctcccaggttcaagtgattctcctgcctcagcctcccaagtagctgtgattataggcgcccacgaccacgcccagctaatttttgtatttttagtagagacggggtttcaccatgttggccaggctggtctcaaactcctgacctcaggtgatccactcaccttggtctctcaaagtgctgggatgacaggcatgagccaccgtgcctggccaaggactcttgattgcaaatgacagaaactcaactcaatctcaaagtaaaaagggactttaagcgccttataatggagaagtggtgccggagctctgtcatcattctaatagcttcttccctatgactagagaagttggcctccaggcctataaggtctcaagctggcaataatagtataaagacatcatcaaaatagtaatctcagggaagaccctgattggctttgcttgggtcacatgtcaattcttgaaccaatcactgtgaccaaggtaatgaagatattctgattggctggaatagattctatgcccacccctgggtgggagcacatgatgatggctctaccagggctgcatagagagaggagaagctctccaaaacaaacagggggatgggaacacaaggtaaacaacaaaacctttggtgatcattatccacttcagaaacacggagaaggaaaaagacaaaaaagacagcttcttctctcaatgacctcctcttttcacaggggaaaatctgatgtttaaatgtttcctgatgaggtcctaggatgggctttggggagtgacctgtgggtaggttagggacctcaaacactgtctcaccctttcctaggatgcccacaatctcggtgggaaggatgagatggaaataacctatggaaataaaacctcttagagctcctaaaaaagactgaaaacttaccttgtttaactgtcctgatttatgccagggagcttcacccagggaggagtgactcacgttgtcacactgtccagccaggacaacaatctgttatacttcatctgtccttaaatcggcctcttgatggagcagcctgtgctgtataagcggagaccttgagttcaggcccctctctacccactaactccgtgaggcatcttgggggtttgcctgaattctcagaacctcagttttctacctgtaaaatggaacccataacctctgctttgcctgtttcccgtctgctgtgaggcaacaacacacgcatttgtcacgtctcactagggatggaggtcataagatgcatttattgagtgtccactctgtgccagagacagcgtgctggatgctggccatatcagggtgaacatgacagacagtccctgccttcatgtagctcacagtctagaagagagtcagatcttaataatgagtgccttatacaaatggtggtaaggtcttaaaggggaaaaaagagcacaaatcaatggaacccactggaggtccaggagggtggccctgagggcttaagctgggattcaaagagaaaacataagaagtcagggaaggctgggctcggtgggtcacacctgtaatcccagctctttgggaggctgaggcaggcaaatcacgaggtcaggagatcgagaccatcctggccaacatgatgaaaccccgtctctactaaaaatacaaaaattagctgggtgtggtggcgcatgcctgtaatcccggctacttgggaagctgaggcaggagaatcgcttgaaccagggagtcggaggttgcagtgagccgagattgcgctgcagcactccagcctggtgacagagcaagactccgtctcaaaaaaacagaagaagaaaaagtcagagaaaagcattaaagtcagagggaacaccacatgcaaaaggcctgtggcaggagagcatgttggaggcagaaaaaagccagagagtgatggggacagggacacaagaggaggtgggaggcatgggcaaggctccgtagaccagagagtttgaattttctccttagagccatgaaaacccatgggaaggaattcaggagggagtaatattatcagattaggtttttcttgaccacccccccgccggctgactcccttcaaaaggttcctccagtgcctgggtggaggagaccgtgggagggggcaggggctacagggagacccaccagcaagggggctgacatggggtgctggagaagagttgggctccaagggtggtggaagccaaaagccagggctctggggggacttggggctggatactccaagtcaggggacatagagggctgtgtagctccccccagcacatccctgagcctctggagaagtccttcatctctggagtttctctttcccttccagtccagccctttcttgttattgtaggacagactccatcgatgactcattcaggacttgggtttcttgttccagcagtctcccttcccctgattactttgggctcctctgggcctgcaggcctcgcccctcatcatctggggaggcagccaagaaccttgctggctgggtgagctctacggaggaaggagccgggaccctcctagcttcaggccccacccatgctttcctgcctctggttttgctctcctctttcccccgccaggggacccctgttctgcaagtcctgctcctccttccaggaccacctcccctgggaagccctgctaggtggccccgcacaatcttctccaccctgctcagtggcacctgtctttttattcaacccccaggagcccaccttctggtgagtgaggcaggggtgtattgatggaactacagacacaaatatggtaggaacctagaggagggaaccaataacaccccctagagattgggtcagatgaggtttcccagagaaagggacatttacacctgggttttgaaggaggaatagaagttcatcatggggagaaaaataagaaggcattccaagccaaagaaacagtgtgtgcaagttatttctgtaatgcatgaaaggggcccagtgcatgtaaatgtttgttgaatgaatcaatgtttgggggaacattgagaaatttggtgtggctgcatcagagcttgcaaactgtcagtggataggccaaatcaggcaaagagaaggttaaaaaaaaaagtgaaaatggaattaattctcaacatctaaaaattgggaggcttcacagacactccggagctgggcagcatcctctgcctttaggcgcatgctatccagctcaccagagtccccacctggctcagtttactcattcatgctactccttgggccctgtggacatttgaatttgcacccctacctacttgttatactcctcaaggttctggactgtgagctactcacagggccaggcacacagcaggtgcctaatacatctttgttggctaagtggatagatggtgtgatgattttaaaatatgtccccaaatttcttaacactctggagcccccttcagtgtgggctgaacttagagactcccctgtagacagccaaatgtagaagaagtaatagcttgtgatttcagaaactaggtcacaaaagacactgtggcttctgcctggctgtttcttggattgcttgctatggggaaagccagctgccattttgttaggatactcaaacagccctgtggaaacacccaggtggcgaggaactgaggcttcttcttgccaatggccggcaccaacttgccagccatgtgagtgagtcaccttggaagcagcttctccagcccagtctagccttagatgattgcagcccaagctgacagcttgactgcaacctcatgagagaccctgagttacaaccacccagtgaggctgcttccaaacacctgatctacagaaactgtgtgaaacaataaatgtttattgttgtctcagatgctgagttatgaaataatttgttatgttacgcatcaatagataactaatatggatggatggctgggtatctggatggctggatagatttatatagagcgcattaggtaatggaggaagtcccattgggaaagagggtcagagcctggagagccagaagaagtttgtaatccctggtcatctctaagctttagggaggttattcaggcagccagaggaggagagagttagtgagttttgaagccaagaggtcatcagaggctagaccactcatcctggggagacagcctgccctgtgtctccaaatccagcttcctcaagcagcagttcatactagtccttcctaccctgaggtcctggctccatcattcctcggccccagctggccctcagaattgtggaggaggtcaagacttcagcatttttcagaagccaagtcatcctcctcactcagagtcttctttgtgtggaggaagcagtttctcgactggtgggggactcagggcagggtcagtagccttcaggaaccagaggagggtattgagaagctgggaccctctgtggagaccctgctggccccaaaggcatggtggagagccacagccaccaaacatccataggattaggtcagccctaagatccagtatattggtattgtttgaaatgacccaacacatgtcctcgggaaacatatgtacaatgggcctggcacatatgagaattttttaagtaaatcaaaactgcactgaaatgccatttttcatctatcacattggcaaaatttcaaaagcttgacaatacctgctggtgaggctttgagcaaatagctactcttataaattgtcaataatgcctgttggcaataaaacttctaggaaggaatttgtaatatagaacaaaacaggatatgcatttactctttgatccaggatatttacttctaggatttatcctaaagatataattccacaaatatgaaaaatgtgtatgcaaggttatttattgaggaattatttataatacaaaatgttgaaaatacacaaatgcccatctgtagaaaactggatgaataaactatggtaccacatgagagaatgttatgcagccatgaaggcaagaaggaagatctctgtaaacctacagggagtgatttccagcatatattgttaaacaacaaaataaggtaaaagcaaaataaaggactacctatactatgcaaacttttaagaaaataaaaaagaaaacatttatttatttacatacatatttaaataattatgcaaaagaaacccaggaaggataaatcggaaacttattgcaaatggttactcataagaagttagtgggaatatcaatggagaagaaagagatgggagtgagattcctctgaatatatttgtacaggatttttgactttttaaccatgcaaatattttacattctcaaaaataaaattaaataaaaagataaaaatgtaaactgtaaacttataaacaaagagtaaagagatgagcttaactaaatgtcaaataataatatagccacacaaagaaaataatttaagtaagtgtaaccacaggagtctaggtatttagtgttataattctaaaactactatctctgtgttgtatgatggaagaaatgagtaaatgtgctgatgttttgggactcagcgttctcactatgggaaaaggaagtcaaaaatatggagtggaggaaggatctgtggctatggctatgagtgttaactggagacattgatatgagcagaccagggaaaagcaacatacctatagcaattagcacacccagggcccagatcttgtctcctaaatgccatcattccctactaaacagaactagtgtccttagaaaaatggctgattccaggattgggcagggaaagtgaatggtgaacctgaagcatctcatgtcaaaatgcaaggaaacactcaatgaatgatgaggccaagtctaaaggagccaacttaaaggggctcccactagccaaagtccagacaatttgattctcaagagaagaacgatgaggtttctcactgttggagtgagagattaccaacaagcaagggactagaatgatccatgtggcaatggatttgacttggagacagtagcttcccaatgcagataggtaagttgatagatagttgcatacagaaatgtttataggtatgtgtatataaagaagttcatatatacatatattttcttgttctatcagctgagaacacttagaagcactgacattgcagtagcaacaagcacacttaacatccaggttttggtgtctaattccattctccagtaaaagaaaacagggatccctggagaaatggctgattcaggctggacatggtggcttatgcctgtaatcccaacacatcgggagtctgaggcaggtggattgcttgagcccaggagttcaggccagcctgatcaacatggcgaaactctgtctctacaaaaaatacaaaaatcagttgggcgtggtggcatgtgcctgtagtcccagctactcaggaagatgacgtgggaggatggcttgagtctgggaggcagaggttgcagtgagctgagatcacaccactgcactccagcctgggcaacagagcaagattctgtcttagagagagaaagagagagagagagagagagagagagagagaaatgggtgattcaagcaaggactggggtagaaaatgtacaatgtacaagatgagcctggagcatcataagaaaatgccttaaaaaaacaaagaaatccacaatgatggaaggatgtgaaagggacacagaaaacaactgaaagagcttctaatgaccaaagctggatggaacaacttgaacaagaaaataaagcatacactgatataaataaatgagtgcataaataaacagtcacttgtcccttattgacagggatgctttctgataaatgcattgttacagggatatgttctgataaatgcactgttaggcagtttcgtcattgtgtgaacgtcagtgtacttacacaaacctaggtggtatagccagctacacatctaggctatatggtatagcctagtgctcctaggctacaaacctgtacactgtgttattgtactgaatactgcaggcaattgtaacataatggtaagtatttgtgtatctaaatatacaaaaggaaccattaacatacacttaccatgaatgaagcttgcaaaacaggaagttgctctgggtgagtcagtgagtgagtcgtgagtgaatgtgaaggcctaggacattactgtaccctactgtagactttataaacattgtacacttagattacatggaatttatacaaatatttttctttttctttttttttttgagacagagtttcgctcttgtcacccaggttggtgtgcagtggcacaacctcggctcactgcaacctccgtctcctgggttcaagagattctcctgcctcagcctcccgagtagctggaattacaaatgcccgccaccatgcctgactaatttttgtatttttagtagaggtgaggtgtcaccatgttggccaggcttgtcttgaactcatgacctcagatgatccactcgcctcggcctcccagagtgttgggattacaggcgtgagccaccgtgccaggccctaaaaatatttttctttctttaataataaattaaacttagccgtaaatttttttactttctaaactttttaatttttaaaacttttgactcttttgtaatagcaacttaaaacaccaacacattaaaccagtgtacaaaaaatattttctttctttatatctttattccataagcttttttctatttttaaatttgttttaatttttaaacatttttgttaaaaactaaaatggaaggccagatgcagtggctggtgcctataatcccagcactttgggaggcagaggcaggaggatagtttgagggcaggaggatagtttgaggccaggagttcaagaccagcctgggtaacatagcaagactatctattaaaagaaaaattagctgggcatggtgatgcatgcctgtagtctcagctaatctggaggctgatataggaggatggcttcaacccaggaagtcaagactgcagtgagctaggatccctccactgccttccagcctgggccacagagtgacaccttgttgctaaaaattaaaacaaaaaataaaaataactaaactgcaaacacaggccgggtgcggtggctcacacctgtaatcccagcactttgggaggccaaggctggtggattacctgaggtcaggagttcaagaccagcctggccaacatggggaaactccatctctactaaaaatacaaaaattagccaggtgtggtggcacaggcctgtaatcccagctgcttgggaggctgaggcaggagagtcgcttgaacccaggaggcgaaggttgcagtgagccgagattgtaccactgcactccagcctgggcgacaagagcaaaactccatgtcaaaaaaaaaaaaaatgcaaacacacatattagcctaggcctacactggatcatgatcatcagtaccactacctatcacctccacatcttgtcctaccggaaggtctaggcaatgggaatttctcagctccattataatcttacgggaccaccatcgttgttgaccgaagtgttattatgcagcacatggctgtaagtgtgagagattaggcaaatttcctgtgcagaagaattccaaatagtttatgtagatacttcacccccaagaagacacagcataaataaataacttccactcctaaagtgtggactgcacatagtgacttccttccaaaagttacagtatgggaaagaggagaaagagtaactttaccgtggagaaatctgacaaatatgacctcggccaggtgatcaaggccaatatcaacagtaataaattgtgttaatgctacatactcttgatatgctgtgtaaggatggggcgcttcagatacaggctgccttagacatctctattctgcccccacctgccttgcaaagatgtcctcagggagagagtaactgtcttctccagggccacacagcatgctgggaggggcaaatacctgactggcctcttcacagcatcaacagagttaccacacctatttcacagagaaggtaagggggaccctgagggcttgtacaatttgcccacatccccttacagtggtccagctgcaaaaaaaaaaaaaaatagtagaggggctccccaaaccacacacaccccaaatagccacagcttagctcagcttcctcccatccctggattctcagcactgagatgtctccctccccgacattctagcttcctctccctcttttcccacagggacggcccctttccctctatggccccacttcagagctctggggctacccaaggacaccccaggcctcttccttacggtatgaacaaaactgggcagatgctatggcggtggcgccacggagggggccggggtcatgttgcggcctcacgcaacaggcggctgggagcttaagtcatggtgaaagggctaaattgtcctgtgcagctgtgcttgtttttcttccccgtttcagtccgcagccctgataggggagggggtaagctggaggcggtcactttttttcctgcctgtgttcccccatcccagggagtcctccaagactgtcctccaggagcctacacgtgctgctttcacctggtttcttataaagcagagtctcgggtctgcggagtgggaatgggtcttcatggatctagctgttgaaacatcagaatgatccatgggggtgcaatccaggcagacatctgcctcccccaataggattagaaccccaggggctaggagcagaattgcagtgttaataaacacagatggttagttagacccagcttgactatacagattgagaaaaactggggcccagagagggacagagattgctcagggtcactgaataagacctatggctaaacctaagctaactccattcattcattcattcattcattcattcattcataaaaacattcactcagcattgactacttccggccctttgccaagggtttagcagggcgggagttggctcacaagatgctcacaataagcaagcatgtatacaacaaacatccttcaaaagtgcagtgacaagtactgcaattgagatgtctgagataccacaggagcccaggaagggtacttgaccaggcagaggggaagtggtcagggagggatgcctaggggagctgataacacaagcagaatcctaaaggagccatagaatatatctatgcaaatggccaggcactgtggctcatgcctataatctcagtactttgggaggctgaggctgaaggttgtttgggaggccagaagtttgaaaccagcctgaggaaggagttggttgaacttgtttgtttgagaccagagaagcaagacgtcatctctacagaaaatacaaaattagctgggcatggtggtgtgcacctagctacttggaaggctgaggtgggaggatggcttgagtctaggtggttgaggcttcagtgagctatgattgtgccactgcacttcagcctgggcaacagagtgagactccatctctggaaaatatgtgtacaaataatttttttaattaaatgaaaatttgaaaaacaaaggaggaaggaccctccaggcaggaggatcagcatgagcagaggtttggaggtaagagcggtgtgggtgggcagcaaaaagcagttcagtgttgcaggagcccagatttgtgtggcaggaagaggcaagaagtttattgcacctgctgagtgcttactatatgcagggccctattcaggcactgggtttaggcaccatgagcaaatgtacacaaagcccctgccctcatggctcttccattctaggggaaagacaagaaaaaaaccaaaccaataagcaaaccaaggcataatattcatgaggaggtaagtgctgaggggggaaataatgcagagtaaggggctcctatttcatgacaggtagccagaaaaggcgtcttgatgaacacatccttagcggagacctgaaggaggcaaggtagtgagtggcgaagcatttgggtaaagcatgttcaaggaggagggagcagtgagcacaaaggtcctgaggcctgagcaaggtgaggctggagaaggttggcaggagccagttcaaaaaaggaccttacatgacatgctaagaagtcactttcctcttcttctagtaaagtataagaagccagtgttggggctttgtgttagtccattctcacactgctataaaaaaatccccagctgggtgcagtgactcatgtctgtaatcctagcacttcgggaggccaaggcaggcagatcacttgaggtcagaagttcaagacaagcctggccaacgtggcaaaaccccatctctactaaaaatacaaaaattagccaggcatcatgtcacaggcctgtaatcccagctacttgagaggctgaggcagaagaatcgcttgaacctggaaggaggttacagtgagctgagatcgtgccactgcactccagcctggtgatagagcaagactccatctcaaaaaaaaaaaaaagaagaagaagaagaagtagaaatacctgagactggtaatttatacaagaaagaggtttattaactcatagttttacattgctggagaggactcaggaaatttacaatcatggtggaaggcaaaggagaagcaggcaccttctttacagggtgacaggatgaagtgagtgccaagcgaagcgggaagagcccccttataaaaccatcaggcacacactcactatcacaagaacagcatgggggaaactgcctgcatgatccaattacctccacctggtcctgctcttgaaatatgggtattatggggattataattcaagatgaaattttgggtagggacacagccaaaccatatcattctacccctggccccttccaaattttatatcctcacatttcaaagcacaatcgtgtcttcccaacagtcccccaaagtcttaattcattccagcattaacccaaaagtccaagtccaaagtctcatctgagacaaggcaaggcccttctgcctatgagcctgtaaaatcaaaaccaagttagttacttcctagatacaatgggggtccaggcattgggcaaatacacccattccaaatgggagaaatcggccaaaaagaggggctacaggccccatacaagtctgaaatccaatagggtagtcattaaaccttaaagtttactatgtaaactttaagtaaaccaaaatgatctcctttgactccatgtctcacatctaggtcatactgatgcaaggggtgggcttccaaagccttgggcagctctgcccctgtggcttcagaaggtacagcccccttctcagctgctttagttgactgtcattgagtgcctgtggcttttccatgtgcatggtgcaagctgtcagtggatctaccattctaggatctggaggacagtggccctcttctcacagctccactaggtggtgccctagtgggaactctatgtaggggctccaaccccacatttcccttccacactgccctagcagaggctctccatgagggttccaaccctgcagcagacttctgcctggacatccaggcatttccatacttcctctgaaatctaggcagaggctcccaaacctcaattcttgacttctgtgtacccacaggctcaacactacatggaagccaccaaagcttggggctttcagcctctgaagcaatggcgtgagtggtaacttggcccattttagccacgactggaactgaagcagctgggaagcagggacgcaccatgcctcaaggcttcacagagcagcgggggcctgggcccagcccacaaaaccgttttcccccctaggccttgggacctgtgatgagagtggctgccatgaaggtctctgacatgccctggagacattttccccattgtcttggtgattaacatttggctccaggttacttatgcaaatttctgccgtaggcttaaatttctccccagaaaatggatttttctttttctattgcatcctcagtctgcaaattttccaaacttttatgctctgcattcttttgaatgctttgccacttagaaatttcttctgtcagatactctaaatcatctctttgaagttcaaagttccacaggtctctagggcaggggcaaaatgccaccagtctctttgctaaagcatagcaagagtgacctttactccatttcccaaaaagttcctcatctccatctgagaccacctcagcctggacttcattgtccatatcactatcagcattttggtcaaagccactcaacaagtctctagatagttccaaactttcccatatcttcctgtcttcttctaagccctccaaactgttccaacctctgcctgttacccagttcaaaagtcaattccacattttttagtatctttatagcagtgccccactcttggtaccaatttaccgtattagtctgttctcacactgctgtgaagaaatatccaagactgggtaatttataaaggaatgagatttaaattggctcacagttccacattgctgggtaggcctcaggaaacttacagtcatggtggagggcaaaagagaagcaggcactttcttcacagggtggcaagatggagtgagtgccaagcaaagggggaagagccccttataaaaccatcagatctcgtgagactcactcactgtcatgagaacagcatgggggaaccctccacctggtcccccctttgacacttggggattatgaggattataattcaagatgagattttgggggggacacggccaaaccatatcagacttagaaaacaataccccaaaatgaaggcctcagaagtgagtttcttctctgaccccctcctgccctcctagctctcagtcctattcctgaaggctagccatagaaactagcatgtgctatagaaaccagaacctcttctccccaaagctagtcataaaacctaaaaatactactctaattttccctccaactttctgtataaaaactggccataaagaaatgatctttcctttgactgtaggtcataagaccccccattccagaaaaggtcctgccccatccccagaaggaaggagcactgctcagagaggccaagaataatctagataggcgggtcatgctgggttcccactcattctatcagcattcgatcagacctttttgtccagtcgtatttctacatggctgtttatacttcatggaacctaagcataaaaatgaacaatttcctctgtatctttgggtcttcattctaaagactcccgtgaatacacattaaatacatttgtgtaccttttctccagttaatgtgccttttgcaaggtgatttttcagagaacctttagggggctctcccttggccccatgccagcaaaaggtttaaacagagaggtgggggcatgccccaggttagattttcaagttcctctgacttccatgtggagaatggaccaggtggcagcaggagggccagtgaggcatctgttacatggaccgggctggaagtgatggtggcctggatggtggacggagggcatggggggctgaggaggagaaatggggtgctgaactaactagcaaaggggcaaacccatagggctaggctggttgctgttgctgggttggtcagggtgatggcaggtcatgggaggaaggcaggcccacctcttagacagaggcaagcagggatgagcaaggctggggaaaagacacatttagttttgaacgcctgagcctgaggctcctatgggacatcccttctcagggatgatgatctggggctccagagagatctgagctggagaggaggttgaggagttgtcatcatgatggggggttgggagtactgcctgacccacttgtcatttgccttggctcatgactattgaactgggagataagggggcccaggacagaaccccagaacccaggaaacccccagggttaaaagatggaatagaagctcacaaggaagggaaccaaggagttgtctaggccccaaggagaatgaggggagtgccaaaggatgcttcagtgggaaagagacaggcaatgttaaagttgtccccagacctactaaatcaaggacgaaaatatgtccctggaatgttggcaggcagtaaacagaatgacactgctctcaacagactgatgtggatctatctgcaaggttggcatgtgtctgtagtcccagctactcaggaggctgaggtgggaggatcgcttgagcccaggggtttgaggttacagtaagctatgatcgcaccactgcactctagcctgagtgacagaatgtgaccctatctctaaaagtaaaaatttaaaaatgccaggcacggtggctcatacctgtaatcccaacactctgggaggccaaggcaggcaaatcatttgagcccaggcgttcaagaccagtctgggcaacatgacgaaaccccgtctctacaaaacatacaaaaatttgctaggcgtggtggcacatgcctgtagccccagctactcaggaggctgagatgggatgatcacctgggcctgggaagtggaggctgcagtgagccaagattgcaccactgcattccagactgggtgatgaaacaagatccccccatctctaaaaataaaaattaaaagaggccaggtgcagtggcttatgcctgtaatcccagtactttgggaggccaaggtaggcagatcacttgagcccaggagttcaagaccagcctgggcaacatggtgaaaccccatctctacaaaaaatacaaaaattagccaagcatggtggtgcatgcctgtagtcccagctactggggagtctgaggtgggaagatcacctgagcctgggaagtcgaggctgcagtgcatggagatcacagcactgcactccagcctgggtgacagaacaagaccctgtctcaaaaaataaaattaaattaaaagaaaggttgtatttgttccctactgctaggtaccaaatgactccacagcctaggggcttaaagtggcaatgaacagtttctgtggtccaggaattccggaatggcttagctgggtggctctggctcagagcctctcatgaggttgcagtcacaatgctgctggccagggctgcagtcatctgaaggctcaacaggggctgacggatccacttccaagatggctcactcacatggctgatgagctggtgctggtgttgccaggaggcctcagttcctcatcctgtagacctctccacagggctgcctgagtgtcctcacagcatggtctcccccagatcgagtgatcccagagggagcaccatgggccaccgtgtctcatgacctaacctcagaagtcacacactatttccacaatgtcctagcacggtcagccctatccagtgtgggaggggatattcatgaaggcagggattcctggggaccatctgaggctggcatccccaagacaaagaaagtgtaaacatgaagttctcagcagtatgtttcattcacaaagatttgtggaagctttttaaaggccccccaactacataacacacgatagctgatatggtttggatctctgttcccaccaaatctcatgtagaattgtaatccccagggttggaggtggggcctggtgggaggtgatcggatcatgggggcagagtttccatgaatgattatcaccatccccccttggtactgtataatgagtgagttctcacaagatctggttaagtgtgtggcacctccctgctctttctcttcctcctgctccagccatgtgaagtgctggcttccccttcgccttccaccatgattgtaagtttcctgaggcctccccaggagccaagcagatgccagcatcctgcttcctgtccaccctgtggaatcgtgagccaaatatctcttctttataaattatgcagtctcaagtattcctttatagcagtgcaagaatggactaatacaaaatcttgtgcttatactgtcctagaacatctctggaaggatgtactgttcactaactttttgaatctcacatttttctattcctctaataaatatatgttttaaaaataattatcggataatcaaaaggagtgtccactgagtttggaaatacgttttttcatatatccaacccacagatatttgcgaagctgctactgtgcatcaagctttgttcttggcactggaaatggtgaagggaacagagcttcgccaccctcatgggctgggttcttttcctagggctgccataacaaaatgctacagatggagtcacataagcaagagaaatgtattgtctcaccattctgggggctagaagtttgaaatcaaggtgtcaacggggtcggttatgttgagggctgtgaggggaggctctgttgcaggctggcttcttaacttgcgggcggccgtcttcatgttcacgtggcatctttgccatatgtacgagtgcccacatttcccctttttataaggacaccaggctattggattagggcctaccctaatgacctcattttaatgtgggttcctttgtaaagactatttattcaaataaggtcacattctgtgatattgtgggggttgggaattcaacataggaattttcagaggagggacataatttaactcgtaacattggccttacgtcgagtgagggagatgataagcaaaggggtctatagggcctcaggagcccagggagctggagagggagaaagcagccccgggggaggtccacaatgggcaaaggcagggttggcctgtgggtagaaagtgggtgggagcagaagaagtggatggagggtggagagtcaccaggagacacgtgcagctttgaggagctttggctgagcagggagtccagagtggtggctggagggaaacctgggatctagagggagtcttatctgattttatgatgaaaaatcttgtaagctgaaaagacaaaaaaaaatgcagaaaaggagggcaaggccgcaggttgagggttgggcctcttctgggtgcggagaggaagagagggagggaggagaggcaggtgtgtgtgcatggtgtggggtaggagatctgctgagtaaggaggtgccaggctgcaagggccctgaggagggagaaagctcagggtttggctgagggacacaggaagcttgcagggagtgggggctcccaagccctctctcagccctcagacctccctcccaatccccgacccaccccggcagcttctatccttccgtttccttcccatctctcccagggtccctcctacggcccgtggatctgtccctccccacagctgtcctgctgatcaatggatgctctgttctctctggctcccctccacgtgtccccgcctagcaggggccatggcctcaccccgggggtgcacaggcctgtggtcaaagcaatctccatctggccacagggaagttccgcctccacaactatgacaatatttgaaattcttcagaagttgcattttatgttatcacacccattgggtcctgcccaccttttgaaaaccctccagggacccccgactgctcagagaacaaaacccaaacactttaaagtgacctccaaggctctgcatgcttcagcttctgcattgctttgtagcagcgttttatcttgaaataattttagctttacagaagagttgcaaagacagtatgaaaaattccagtattccttttctccggttcccctcatgttaacatcttacatcaccataggacatttatcaaaactaagacattaacattggtacaatgatgtgttacttttgtaggaaatgatagtaattatggatttttttcatttttattgtggaacatgccatagagacaaaggcatatatgtacagtctgaagaataacaataaatacccttgaactcaccaatccatttaagaaatagaatactgctgttacccccgacactctgcatgctccttcctgatcaaaccccccagcctcaatgattgaagcagggatgttaatttatgggggtgactgatgacatagaaagaaagaattgattacttacaattccaagacaaggcatcacacagtgccacagagggccacggaggcagcaccaggaagccgtgcagatgcctgcgtcatgcttcctgcacaccctgtggagtgtacacccttgggtgaggaggtagaagcaggggcaaagacagcactgggccagaggctttattggagtttccaggacaaatgcaaggcaaggcagactaaacatcgtgctctcagaacggcacacaatttaaaactcattaattgtttatttctggaacttttcaattattttcggaccgaggttgaccacgggtaactgaaaccacagaaagtggaaccgcagataagcgggggctgctgtatagcatatgatcatcttcatgttacaacgcttctattttcttttttgagacagagtcttgctctgtcacccaggctggagtgcagtggcgcaatctcagctcactgcaacctccacctcctgggttcatgcgattcttctgcctcagcctcctgactatctgggattataggtgtgagccaccaaacccagctaatttttgtatttttagtagagacagggtttcaccatgttggccaggctgatcttgaactcctgacttcaagtgatccgcccggcctcggcttcccaaagtgctggaattacaggcgtgagccaccgcccccagccaatgtttctatgttcgattgttaatggcgatctggtttctctccaggtgcacaatgcttctttgagtatctccgtgtctgtggctgatatccagatgcaaggcttcttccgggcatccctgggaatgggagtgcatagacatactggtcaaattacagcacagcctctacacctttactgaagatggaaaactgttttccaaagttgacttgcctaacatgatgtaactatcatgcaaaaataaaaataaaattaagaataaaaatttaaaaatgaaagtttacgtgttcaccagctccctccagacgctcatctgcctttggtgctgtctgactttgtttgtttatttatttatagagatgggggctccctatgttgcccaggctggtctcaaactcctggacccaagccatcctcccaaagtgctgggattacaagtgtgagccaccacgccaagcctgactttaagatttttgccaatccagtgggtatgtaaagatatctcagtggatcttaatccacacttctttgattgataatgagattgagcatttttctcatgtttttaaatcacttatgcttcttttatgaaattcctgttcttttgttccccaatttctattgtgttatttatcaatctttttcttatcgttcataggcgtttttctatattatggatgctactcctcggttagtcatgtgtgtttcaaatcttgctaattgtgactcgtcttttcattctctgaatggggtcttttcatgaaagggccctctaaattttaatgcagtcaaatttgtcaactatttactttatgggttaaactttttaatctcatttttttaagtttcattaaagaatcttttcataaagatgctctcctatattttattataaagttgtaaagttttaccatttatatttaaatccttaatccatctggaatggatttttaatgtgtgggatgacatacggaatcattttcattttcttccatatgaatagcgagttattctggcaccatttcctgggaagaccatccttttctcctggattcgcgatgcaggctgtgttatcaccttttcatatatgcatgagaaaaaaaaatgttaaggaaaaagccaagtgaaataaaatggtaggcaacactttggcccagcaagtccatgtctaagcatttatcctaaagaaataactgtaaatgcaaaaaaaaaaaaaaaaaaaaaaagatttgtcgcaaagatgtggtttataagagccaaaaattagcaaacaatctcattgcatatgcaacaaaagaaattgtttaaataaatttttgtacatctatacaatggaacattatgcagtaatctaaaaagatatggtagattttaaggaggtgacatggaaagaaaaattgaaaagcgcagactatggaaccacatacagatacagtataatcctcactatgtaatctagaggcatgttcttagacaaattacaaaagagggacatgcaagcagttgatctatattatctgactttaaaaaaaatttgtcatcctagcatcccagtatattatctgaatttttatagtgatatcaggcaatcataaataaaacatagttcactttctccatgttaaaaaaaaatgatgttgcatatgcttaggataataccataagacccagcaacccattcctaggtattttcttaagaatctaagaacatttatgttcacacgaaagccagtatgtgaatattcatcataagcccattcacccaaaactggaggcaacccagatgtccctcaaccagtgcatggataaataagctgtggttcatccacacgatggaatattactcggcaacaaaaagaaacattactgatggatgcgacaccatggataaacttcagaacactgtgctaagtgaaaggagccagacccaaaaggccacatacattataattccatttatatggacattctggaaaaggcacacttataggagagcaaaacatcagtggttgccaggggcggggatggtgggagagatttactataaaggggcacggggacattttgggggtgaaggaactgttctctatcttgattatggtgatgattacatgactatgggtttgtcaaaactcataaacctactaactacaaactacccactagaaagggaaaactttacaatatgtaaattacacctcaataaagaatcgcaagctataaaaggtgttgcaggttatacctttgtaaattaaaatacaccaacaatgtgaaagctaaagaaaaatatgtgatgtaagaacatttaatgatatggaaaaacattcacagtatcgtcaaatgaatatccatgttgcacaacgctgtaatacacaagtctatgtacacaaaggcatgcatacatgcacacaccggtagaaagaaaaaactgctggataaacgccgcaaatggtgtccacaggtctctctgagtggaggggtcactgctggtctttattttctttcgctccctgggtttgctgttttcccacgacgtttcccacagtgtgtccccgctggagtccatggctgactcagggaggctgggaggaggtggccactccacagctgggaaaaccgcagcctcccgatgaaccctggctgacgacctgtctatgtttactttttctccctgggcagacaagacaggagactggaagaaggggccagaaattcagactcagaagccccctccagaggccacaaggcagcctggtcctctctgaaccagtggctcccactcactggccccttgtctctgcctggactcctgcggatgagtggaaggccaagagggcgccctctggtgcccactagatcgactcccaattaatcacttaactgtgtgaccctgggccaactactcaacctctctgtgcctcgggtcctcctctgaacatggggataaagacagtgcttgcctcgtggggatgttgtgtgtgtatacatgcatacacacgtgtgcaaagagcttagagccacgcctggtaccatttacatgctcagtaaatgtttaggaggattgttgtgataacccagcagactgatgtgtaagcctatggtcccatctcagggcatgtgggtgtcacaggatcgtagtcctaacagcccaaaaataatgttaaaatgactcaaggacttcacttatgcttctgagcatcctgaaggaaataggcacagtctacagaactacttcctaatgctccccttagttcaactgtccacttcctcagcacagtccctgtatgtctttggaggtcccccttctccagacctccttcattcagccaacagcgtttattgagcacctgctctgtgccagccagctgctgttctaggctcttagaataaatcagaaaaccaaatagatgaaaaattctcattgttcacaagtagattctagacgtctccccagagcaaagcccaggcccttggccttcctctcccctgcctctttcttcctcattctgcacccagaacccaagaaaacgctgcagcccttcctgggagggcaggagagaggaaagatctgagttggccaagccaggctctccagcaggcagggctccagcagaggctgggcaccttcagccatcagcaactgtgtcccattacctgtggaaagcaccagccctggcctggaaaacagtaggagttcatcaagagtggctttgttgtacagtggttgtcttgtacccagttggattggcagcagcttcggggcacgaggagcgactgttcactccttggggagcttgcagcacagggcaaggtgcacagtaggcacttggtggctggcagggccctctggggcatcctatgggtgaatatcttgctgagcccatggaaggcccatgtcagaatccagtaatgtgctggggaggcgagctggggtggggttggaagtggtgctcaccagcccagccagggttcctcttaaaagtcacagtgctcgaagccagtacagtgcctcacccctttttatgccctcacctggctcatctcccatccattagtcctcaaggtacatctgtgagtcccatgggtcaggtagtgggtgcaatgggaggagatgagggtgtggacttgtcctcagatctacctcttagtacctatgagaagtcagcaaccaccctgaccctctgtgtcttcatctgtaaaatgcatatattagtctcttctttggtggaaaggattaaatgagatgttgcatatggaggcatgtgagggttttgtaagtgctcattctcccttttgcctcaggaagaaagcctccaccttcagactatcaggcacctggggacagaccccaggacactgccttttgtggctcttgccacccatggtcacctcagttactcaagccacacatgcatgttcgtgcatcccccacatatacacagaaactcacgggcgttatatcaaccagggttcctagctgcaagcaacagaaagcaaccatgactgacttaagcagaaaaggaatttctcaaaagaatattatttgatttatggaatcacaggaaatcatccaggtctctacctggaaggcagaatgaaccttattaaaatcagttgagatgcgcacttagcattgtgccttgcacagagtaactgctcaggaaaggttatccaataataatgaaagcatgtcttatggtgtgacacctctgctcaaaatcctttcatagatccaattgtctaccatggaaacccggcctctgggctgtggatacttgtgatgggagaggtggtgcgggctccgaattctttccaatagtctgcaaacccgcagagccatgaagcattgtctgtaggccagcactcatcctccacccctctgcctgcttctccgctctcctagttccttctccctcctctaggaattcagcattgccactctgattggctggattttgggacattgattgagccttgttttctagtgggcaggaggctctgtgtcttaaaggccactggcccagctgccaatgaatcagtactttgtttccccaggtagagtgggggcagggggcagggaacgggcagggcaagtttggggcattctgctccgaggtccctctagccaaacgttatcaaatctcatccaacatgctcctggctctccatttcagatgtctgtaaactggggactacaaaatgcaaatatgtttaagagttgctaaatttgcagtgactttttctcaatcagtgttttgcaaatctaactactatcataggaagacctttatacttgaaaaacttggcgggtcactcaccacccagatcaagaccaaagcatggctgtcagtgccttcgcttaaacagttctctccacctggcctgcccttctgccatgcccctcctaggccatcacagatgccagctcagaggggcagttcctgctggctgcatggtgtcccacctggactgtgtcaccagcctcttcacagcctctagccttcggtgctccctacctgaccacccatacgtctagcaggcagacggacgggtccagaaatgcacacctggtcaccttgattgcactgagccctgccctgcagtcagttacctgggttttccaccaggcatccatttagcttagtcatcttcctctgggacagtggccgtttgatggtgacagacctaggcccaggtttctaagaatcaggaagatgaagcaacagggaaagcaggttgaccctcgcttccttccccttccacaggacggtcctgccccggctgacagaggaggggtgagtcctgctgcttcctggcctgtaagatgcccctcaaggtcgggcgtggtggctcacacctgtaatcccaacactttgggaggccaaggcgggcagatcacctgaggtcagaagtttgagaccagcctaaccaatatggtaaaatctcatctttaccaaaacgacgacgacaacaacaacaacaacaacaaaattagctggatgtggtggtgtgtgcctgtaatcctactcaggaggctgaggtgggagaattgcttgaacctgggaggtagaggttgcagtgagctgggactgcaccactgcactccagcctgggcggcagagggagacccagccaaaaaaaatgccccttaagtttcccagcctgaatatattcagtcacctgagccactgagaggctcccccgtggctccagtcagtggcaggagctggaagtctcaggagagaaggaaaacggaacccaaacctttgcaaacactcagaccggctgctaagtgccacgcacgcgtttgatcacactgactcctccggcgagccctgtaaggctggcgttactatcccactttacagatgaaggaactgaaggtggctgaggtagcgacccttcctaatgggtgggagtgggattgaactgagccacacagtcagcatttatccccccaacaaagagtaataactgcccccgtggcccaggcctggcttgccaaaggctgtacattctgtgtggaataaacctaagatgctgtgggagggagggagttcagggaaggcttcctggaggacacggtgctgcatgccaggcaatgggaaatgcatcttcaaaggcatggaggtgtgacaaagtttcacatgttcaaggttatttctctaagttagtgtttctcgaggggtggcatcaactgggagctttccaagccttgtcacctaccctgtactcaggatcagggcgtggggcttgcttttggaaatctgcgtggtcataagctcctgggtggttgtacttgaaagtggcagtgcgagaaccaatggggtgggatgtggagggccctgtgagcctgttaaggaagtgggccttgccccttggtgatgtgaagcagaggggggatggtgctggtgtcggcttcagagagatctctttggcaggtgtaggtgaccagcttggagcctgggcacctgagacaaggccggagcagccatcaggaggccagacagcaggaatcaaggtctggacttcagagtggtcaagaggatagaaagaatagagaaagagagaaggcaggcttgaggagggcttccaggttccagctttatggaggaggcgagagggggctgggtttggagaattggtagagccgagacagcagtgcagcccttacacccgggcaggtcaggaccccacaggccctatgcctcagggtgccccacaccttagagtgccttcctcagaactttctaggtcccacctggcacctagaaccagctaggcatggcagtgtcatccgtgtgggcaccccaggcccagggtcaggccccgatctgctgtctcattcctcatttattctctatgggacactttacagccctggaccctgaggaaggggtctgccaggtgccctgagagctctgggactcatcctatgaagtgtcctggggccctgaggccaggtcccagtttcaggagggtgcctggagagctgatcatccctgctggccagcgcaatgttactttggtggggtcatgtgaaattgggctgccagaatggtcctcaaatgctgatttgaggtgactccaaatatttgcctgcccagggctctgcctaaggacagccgtgggtgcagggacacttgctgctggttggtatctagacactgccctgatatccctgggtgccttcctgctaccctggccaccccagatggggtgactcaggtgaggtccttggggaggccaccctggcacccactggccagtgactcccacctgctggcctctcctcatgtattacacctccaccttaatcacacggccaaccgcaatatccccagcaatagggccatttgatgtcgcatgatctgctgcactgagaagaacgcagcgtcgcttctgtggtttccctgctcagagggcacgacctgaatccagtcccaaggaaacaacagccaaacccaaaccgacagacattctgcaaagcagctgggttgtcctctccaaaaatgtcaagtcatgaaaacactgagaaactgttccagcttaaaagagaccaagagcctgggcacagtggcttacacctgtaatcccaacactttgggaggctgaggtgggcggatcatgaggtcaggagttcgagaccagcctgaccaacgtggtgaaaccctgtctctactaaaaatacaaaaattagccaggcatggtggcgcttgcctgtaatcccagctgctcgggagacgaaggcaggagaattgcttgaacccaggaggtggaggttgcagtgagccgagatctcaccactgcactccagcctgggtagtaagagtgaaactccatctcaaaaaaaaaaaaaaaaagaccaagagacatgagaagaaactgcaacaggaggtcctatattggaccctagacccattcacatcattattggtaccattggtgaaatgggaatggggtcagtggattagctggtaatactgtatgaatgtttgtgctgtgataggccgggcacagtggctcacacctgcaatcccagcactttagaggccgaggcgggtggatcacaaggtcaggaaatcgagaccatcctggccaacgtggtgaaacgccgtttttactaaaaatacaaatattagctgggcatggtggcacgtgcctgtaatcccaactacttgacaggctgaggcaggagaatcacttaaacccgggaggcggaggaggttgcagtgagctgagatcgcgccactacactccagcctggtgacagagtgagattctgtctcaaaaaaaaaaaaaaaaaagtgctgtttgtgctgtgattatgcaggaaagcatccttgtttttaggaaatacaaactaaaatattatgcgtgcacttacacccaaataattctggaaaaatatttacatatatatatgtatacacatatatattcatatatagatacatctgtaaagataagtgtagtaaaacattactaacttggacaatctgtgtgagataaatataggaatttttgtacgatttttgaaactgttctgtaagtttggtattatttcaaaataaaaaattgaaagcaattttacagtctcaacaaccacaaattataatagacatggctaccataattgagcatctagtatggactccaatgcattggctcatttaatctaacattaacaacacaaggtagatattattcgtcctgttttacaaaaaacgaaagatctcagagtggttagtgactttcccgaggtcatacagcttgaaagcagcagaggccagaattgaacccaggccatactggcttaagaatccgtgctgtcaacctctgagagatggagaaatgagcaagtaaacagacgacaattacacagggtggcaattatggagacagactctgaagggagcccagataacctggaaggctccatgtaggaggcgatatttgaactgggccttgaagcatgtatagaagttttccacttatggaaagaaagtctccaggtagaagaaatggcatagtcaagggcgcagaagcttgaaaggataggtccctggaggttgtttttctgggcctcaccaccctgtgggtaaaaacgtggttacattaagtgtcactggctttttgtcattgcctacaaagtgcccctcatgcttctccatgagtccacaatccacattcacctccgtcacataacacaacaggaggtgccccttcccctcattttgaaaccttcagcatccctttgccacttttctgcttgtgtggccttaggcaagttacataacttctctaagcctcaattttctcatctgtgaaatggagccaatgatacctactttcagggctagataaggattaaaagagaatgtcagccaagggtttggcttggtttctgatatggattaagcccatcaaagatggtggctgttcttatgaatgaggaccctagatcccagagaggggcaaagactggtccaggttcacacagccaagcagaggcaaaaccaaggctccaccccaggccctggtccccactaacctcccccgaaccccagcctgccaatgttcccagctcgtgctctccctagcatagggcagagccaggccacgagcagctctctagcagccgaggttctctcggggctcagcctgttgggccttggctgggcacatacgtatttcctaatgtggccgaggggaaacagccccaagtgtcagaggctgttgcacatttggcaacagccaactgccggtattgcttttcttcccgtgatcctccctcgggctggaggaggccaggcctgccgtgagccaacattgtgacacaggcgcagctctccagtttcctgagcaaaagaagccagagaggcaccctcccttccacccacccctggagagctgctctatcttgttttcctttctctcagccttcagcttgtcccagaaactgccctttgtgcagggctcaggccttcagtctgagaaaccaccctccttccatcagcccccaggcaccgatgcagatgcctccccccggaagcgttgggggtttgccaggccagactgagcttgtccttagtctccaagcacttagggtctagaactatgctctgactcttcttttaatttattcactattgagtaaatcttgtgtcccactctgggattgctgtgataataataattaatattagtattaataataatgaggaagctcagcccctaccctgtgccccttggaggctcatatctttctgaccagattactcaaaggagcccttttatgagacgtgaagctgggaaggagacagacagtgttttttagcataacaaagcaggggagacaccctcttaagagtttatgccataatacaaaattaatacaaattgtacaaaatgtctgattctcttttttttttttttttttttttgagacagagtctcgctctgtcacccaggctggagtgcagatcacagctcactgcaaactccgcctcccaggctcaagtgatgctcccacctcaacctcccaagcagctgggactacaggcgtgggctaccatgctggctaatttttgtattttttgtagagacggggtttcgccatgttgcccaggctggtctcaaactcctggactcaagcgatctgcccacctcggcctcccaccatgctggcctgattgtcttttccacactgcaccttgaggctggatctccaggtgggcctgcttctctcctccccttcaccctccagcatctaccacaagctcctccttcacctgcaaccccctctcaggatgaaagaatggctggcagcatagcctggaagccggacacacagaggaagggggaccctggtgggtgagggagggaaagggctagaaaatcagagctgaggggagggagagtacagggcctcaggtgaccacagaggtgacctcatgttaaacccaggcaagacctgtgcctgaggatggagcgtggggacaaacgaggaaacaggttcagcaagtttaagcagcaagctcacagtcacagagcgaggaagtggcagagctgggatctgggcccaggtttgtcaggttccaaaccatgcccttaacagccttgctgtgctgcgggggctcacataaggcagggagtggctgcttctcctccaagcccctggcggagtggaaggctcacagaggcaatgtaagccacagattcctctatctttgcccctatccagtccaaacccagaggccagagggccaagagctcagtttccagtgcccctggcttgttttcctgggggctctgaggctctccagccagctagtgatgaaggttgacttacgattatttactgagcaccttctctgtgcaaatcgattcacacctattatctcatttcatcctcaggaacaactgccatgatgagcactgtttcctcatctttaaatgaggaaccccaatttcagaaaggtggaggaacttggccaggctcacagaatagggtagcatggctgggactatgaacccaggactgcctggctctaaacccaattcactttcttctggaaaaagtcgtcagcctaaggacggaagagcaggaaaatagacagatccagcccttgaactgaccaactcttgatccaccccatctgtgaatttctactgagaagaatatattttccctatgatttaagctgcatcaaattgaaatagcaggagaagagttttgggggatgacaggattcttctatatcctgattgtggtcctggttacaacacatagctatacatgtatcaaaattcctagaactaaaaggaactctaggaagcaaatatggcagaatgttaaggttttataaacctatgtggtctattcttttcttaggtttgaaatattttataataattttagggaaaagaaaaaaacaaaaagcaggaggaggaggaagaggaaaaggatatttggggaaagtctgtttagatgggatggctggagctgctgcggccatcttgcaaccatgaaagaagccagtgtaagagcaaatctgagacacggggatgggagagcagagagatggaaagatgatcctgcagatgtcggtcagttgctgaatcaatcagaatctcaaacctgtcctcctccctctggacttcctctctgccataataaatttgtttatcgttgaagcaatgtgagttgatggtttctgatacttgggttgaagacactgttactgatacaggatacggggtcagatctgaagcagtggggcagccccatggccagcagcagtgctgacaaggagactgtggaaagtcactgatgtggctcatctagatgtggctgggcatgagacatcggggaagccagtggggttgcttgttcagaaacttgccagctgggtttttttttttttttggtgggaggttgtggggggacagagtcttgttctaccatccaggcttgagtgcaatggtgtgatcttgactcactgcaacttctgcctcatgggttcaagagagtctcatgccttggcctcctgagtagctgggattacaggtgaacaccaccatgcctggctaatttttgtatttttagtagagacagggtttcaccatgttggcctgcctggtctcgaactcctggcctcaagtgatccacctgccttggcttcccaaagtgctgggattacaggtgtgagccaccacccccggccgtcagctggttttaagattctaattttatagcaatgtaggtcattgtcatgtgatttcatcttaatgttcctttcctagctgacaccctcacggataccacatctacctgggccttggggaactcaggaacttcgagcaactaagagctggaagtgttcaaaaatgtgcaagataatttttcaaaaatctaatttttgtgacaagtcatcaatctatgtgttctggctgctacttagagcaatcttcctggtacagatgcagacatctgagtctgggggctcaaatcacttggaaaaagggagagctggggtgagggcctacagtcatgagtcctcctggcacctgcctcaggtaagggaaaatcttctctgcgtgaaaggaggaatgaccatgacagtgatgtgatcgctgcatctcagtttccttgtttccaaaatggtgaagaggtcaggcacggtgtggctcggccttaatcccaacactttgagaggctgaggcaggaggattgcttgagctcaggagttcaagaccagcctggacaacatagtaagacctcatctcaataataataataataataataataataataataataaaacaaaatggggaagaatcatccctctctcagggttgttttttggcttggagatgatgcatatgaagcatctggcacacagtggatgcttcacacacggccactgctttcattctgaagcaagccagaagaattctagttgctgcagatggaagcaggaggggagactcttttagaaccaaacgaagagaggaagaaaaaaacttttaagaaaaaaagaagaaaacttcagaaggtctcacgtcctccgagctcagcggacttcattagactttcataaagtccaaagtcggggagacagggcactagggggctgatgaggacccagcgggagagaagctggctgccccttctgcagccccgcccctcctctcatcaccatggagacggagcaggctgcccagtggggttcctgcccacccgaggcctgaggctgctgcagagggaggggcaggggctgagcagacagggacctgtctggaaagctgggttggcggtggggagtgtctacatccccccaactcccaaggcgctgagggattcgggctggtgtgggatgcatctggagggctgtgttttgatcctcgctctgctagcagcttgctgagtgaccgtgggaagaacgcttcccctggtgaagcctcaggttctacatctgccaaaggaaggagtaaaaatgtacaaaaacagaagcttggataagaaagctgtgggatgaggaagcaatgaaatatttaatgctggagaagaacatttgctacctattgtttctcgaaaaaagggaactttaccaaactgaccaggtgatcccatattggttaacaaacaaacatggactctctacctatgcttaccaacaaaagagggagaaaagaaatactctaaaatacactttggcttgtctccggaagagggagttatatgtaatttgtattctcttgtttctttctcaaattttggccaataaacatgggttacttttaaaatcaggataacattaatagctagcatttggatatttattttgcacgggcagtatgctaaatgctttacgtggttttaagctcattttatcttctccacaatccagagagggagcagtactatgtatttctcttctgcagaagagaaaaccgaggttcagagaggttaaagggcttgcctgaggtcggaccactagagaatgacagggctaagatttaaaaccatagccaagatactagactctaaaatgtgagcattgaatcattaccactactgcctctcaggacaagaaaacacgaaagcatctgttttcttaaatgttttactatcaaaaatacaaaagaaatcaaaagtagaaagaaaaatatgaatccttatgtctgtgccacccaccttcaagggagtctgtagatgggggcatttgggtggggacacagagcggggaatggggtgcctagggaggggaaccaatctacacacacacatacacacacgcacgcccgcgcacacacacgcatgcatacatggacatgcgagcctcccaggctgcacttctccctgcctgtggggccctaaccacaatggaaaaccacagcggccctccctctttcccaccctcaccaggttccttcctcctttccacattctactgacttgcatttccccagccgactcttttatagctccctggttcaacctcaaggccttgaggttttggcagctctggaggatgagagagaacatggccaggggcccttgcaacgcgccgagatgggcgtccctgatggtgctggtcgccataggcaccgccgtgacagcggccgtcaaccctggcgtcgtggtcaggatctcccagaagggcctggactacggtaactggatgcctcccttccctcctctccacccctgaggagcacttacttagcatctactgtgtgcacccctttagatccagcacctggcacactcatagcacctcagggcaggtccccttgcccccattttatatatgaagaaactgaggcaaagcgagttgcctaagattgcagggctgggatggcagagctgggattggagcactggtctagaggactccaagtccagtgctcagacccctgagggtcctcatggtcccctccttccctctatgtaacctccacctttgacttataagcccttctcttctttccaaagccagttctcagccttgccatttgcctctcgttgctgaggaggctgagcagggtcagagggagagtgtgggaggacctccccaccccgtgctctccccactgcaggggctggcggccatactgtgcacagtgctccactgggtgacacaaagagggtccccccagaccactcaccccagcccaggcagaggagagaaagacctgctctaacctgtgccaggcattgagctaggaactttacacacacagtctcttttaccctcacttcagccttgtgtaagacaaactgctgctatccacatttacacgtgagaagtgggcagcctggatttgagctctggtcttgcctgatgccccagcacggggttgctcgatgctgcctcccgatggcagagagatgacctgcaaaacagtgggtgacacccagccccagggaaatcagaccaaggggaaggcagagcctcaccagttggggtgcgttgggaaaacagacaggactcaggggacctggtatcccacccctgaattcccaccccagcccagcaggacatcactgaatcctagagctgcagacagaaggccacagaagacagaagagctagggggaaggagtatggccctgaagcctgtcgacacagaggctcagtcagggtctttaagttcagtggtcttcatgctccgtcatagcagcctgagtttccccttctacccaggccccttgtgccaatcggagtgagttttctgaaatgcagcaaatccctacacatcctcccctggctcacattctccatggctccctactgccttcagaagctatcctgaccctttggcatggcatttgagacccttcgaggcctggcccctgtcaacttacagatcctggccactgcacatttttttttccctccacacagtgaccagttatgtgtcatttacttttgaacccccagaaagccttctctagggcatgggctctgggaccagaaggcctgggttcaaattctgccccttgtccgctgtgtggcccctagcaagtcacctcagctttctgagcctcagcttccttatctgtgaaatgggggtagtgacaggacctacttcctaggattgtacaaattcatacatatacggagcctagaacagtgcttggcacagagtaaagctcgatacatttcattgatattattatttcctaactggctccgagaaaacccaaagtctgggctccctcatcttactacttactccttttcaggtaatgtgtctgccttttaattggttctttgatgctgttagccacattataactggtggtagaattcctgccattaggacattatttattcatctaataaatctttttttgttttgttttgagaccgagtctcgctctgtggcccaggctggagtgcaatggtgccatctcagctcactgcaacctctgcctccggggttcaagtgattctcctgcctcaacctcccaagtagctgggattacaggcgtgcaccatcacacccagctaattttttgtatttttagtagagacggggtttcaccatgttggccaggctgaactcttgaactcttgacctaaagtgatccacttgccttggctttccaaagtgctgggattacaggcgtgagccaccgcacccagcctcatctaacaaatcttaagtgccttcaaagtgtcaggcacaatgggaatgtaagggacacacgagtaaataaaacagattgctgctgacttcagggggcttacatgtaataggggagagacattcgtcagagtcacgtgaataaatgcataattacaaatggtaacaggggctccgaaagagcagtccacagcatcatgagaataacacagggcgttgctctgatctactaagccagggagggttcccagaggaagtgatgaatgagctgactagaagctgaccgggtgaatatgggagggaagaatttcttagggagcaagaatagcatgtgcaaaggccctggggagacagtccaaaacccagagaggtgggagatctgtgggggtgtagcatagagcaaataacaaattaagtatccaacaaaaactagcaggaggcataactgggtgtttcaggggtgatattttagaccaggggtcagcaaactacagccctccgtttttgtatggcttataagacaaaaatggccttaatgtctttaaatgatgggaaaaaaatcaaaagggccggtcatggtggctcatgcctgtaactccagcactttgggaggctgaggtgagaggatcacttgagcccaggagttcgaaaccagctgggcaacatggtgaaaccccagatctctgcaaaaatgttaaaaaaaaatttttaaaaagttagcctggtgtggtggcgaacacctgtgatcccagctgctagggaggctgaggtgggagaatgacctaagtgcagcgggtcgaggttgcagtgagccgtgatcatgcctctgcactccagcctgggcgacacagcgagaccctgtctcaaaacaacaacaaaagaagaaaaatactatctcacaacatgtgaaaattatatgaaattctcatttcaatgccaacaaataaagtgttattggaatacaggcacatataagaacatgatattgtctatggctgttttgtgcagtaatggcagagctgagtatttgtgacagaggcaatatggtttcctataaagggtcagtttactatttggccttttctaggaaaccttaattgatccctgtttttgacccttccagtgccactgtccatgctacgaacaggggcccagggtccagagcctgccctgcccctctgtcccctgctccaggctgtgcctctcactgtcacccctgccttctcccttcagccagccagcaggggacggccgctctgcagaaggagctgaagaggatcaagattcctgactactcagacagctttaagatcaagcatcttgggaaggggcattatagcttctacaggtgaggcctatcagagctcaatcctcgatttgcaggacttgtagtgttctggggacaccaagagctagaatgcagagccacaaactcctcaactcacagagtttcatatcccaaagcctgcatttacatcatcccaaggggaggcaacctcccagctgagcgtggaggaagccacaaaaaccacgactcccaggaagtgtgtcatgaacccccaaactctgcgccatatgtcaattagaatgtgcaagttttcaaggtcagaaaatcttttctaaaatggcttaaggcagaatgcattggctcacatggccggaaagtctctggaagagtctggcttcaggttcagcttgaggcaggcttacatgtcactgggccctgtttctctcttgccacctctcagcatcacttccttggacaggcctaattcgcaggcagtgtgtcccctccagaggcaagacagccaccagtaagtctctctagatctcctgctcagcactctgaacaaagagccctaagactcactctgactggcccacctcagattatatacacagccctgagccaatcactgtagccagggaatgaaatacactacttggccgagcctaagttgcaagctccacccccgaagatggacgtgaggtcaactttctttggagtggcatggaacagatatggggaggggcttcccctaaataatctagtagttctgttatcacaagaagggggctgtgcactgggcagaaaacccataaaagtcctctacagttttatacacccattcattcacagatattttgagcacccactgtgtgtctgacacagcaggctttggggctgcaatagtgaaacaagacagagctatacagagctcttctgtacagagcttccagtgaaagggccttctattttatcttcattgattgccacacaccctgcaaaatagcaatcactgtgcccattttacagatgaggaaactgaggctggggtaattatgcccaaggtaacccaagagtatattaaagagcaggatttaaatgcaagttttttctgacttcaaaacctaagccactccagttgcctacatatctgccaagcctgctttcttagctttgggctcctcctggaatggatggagtgaaggaccaggtggtgggggacgagtctgcattaaccattaacgaagtcctcatgtgtgcacctaggagtatatgaaattatatgacattcacatttctcctttgcagcatggacatccgtgaattccagcttcccagttcccagataagcatggtgcccaatgtgggccttaagttctccatcagcaacgccaatatcaagatcagcgggaaatggaaggcacaaaagagattcttgtgcgtttccatgcttgcggtttgttgggtgtgctcttggtgatatttggacgggattagagagtcagcgtctctggaatgcccaatttttgccttgcctattaccacctatagccacagcgttcctcaggaaattcttcacatgagaagattcaacataacccttgattaatagctgagaatttatccacatctcagtgcaggatactggcgaggctgagttggtgtatgtggcttagggtggaaatctaagtggaacctttaatttatcccgtttatcagttagctattgctgtgtaacaaaccatcccaaattctgtggcttaaaacaacaatcggctgtcatcacttatgtatctgtcggctggggcttagctgatctgggttgggcttagcagaggaggcttggctccacctgtgtctcctcctccttggaccagtgggttatgcagagcatattcttggtgatagcagaggtgtaaaaagggaaagcaggaacacacaggtcctcttaaggcccaggctcagaatttatataccatggccaaatcatttcacgtggccaagcccaaagtcaagggcaagcaaaggcaccttcctcaaccctgccatgataggcaatggcaagggtatgaatgcagggcagggtgaaaaataggggcaaataacccaaactacaactccaaatctaagtcctgggatctctccacagctaccctgcccattagcaatagtggttcagactgaccatcgctttaggaaggtctcctttctagggaatctagggaggaaaatggaggagaaaccaccctggcggatgaaaggggcgtgagtctgcccgcccttacaagaactgctggatgtgtctcctccccacaataagaatcacttaactctctccctgggctgttttgcatctgtcttttcccttaatgatcacacacaaaaacaaaagaatgtccactgtctcaaccaaaacccatttcatccctgaaggaggagttattaacctcattactgaattaatgggggcattaatgaatgaaagtcattggccccaaacacccagctttttagtagcaaagctgagacacacactctggtgtctgactgctgatccagggtctgagggaggaaatggaagctcagagaggtaagaaacatgcccaaggccacacagctagggcagcagctgaagcagtggttaagagcaggtttctgccaggcaaacatgagttccgaattcaggttggattcctgactctcccattcggctgctatgtgatcttgggcaagctgcctcttctctctgaacgtacctcctcacctggagtggggataataacaaaacccgccttccagcactggggcaaagtttgaatgtcagtgggaagaaaggacttgtcccacattcctctttgttcttcttcagaaaaatgagcggcaattttgacctgagcatagaaggcatgtccatttcggctgatctgaagctgggcagtaaccccacgtcaggcaagcccaccatcacctgctccagctgcagcagccacatcaacagtgtccacgtgcacatctcaaagagcaaagtggggtatggactcccgggactgtggctgggaggagggacttaaagaagaactctcccaatcatccctgtattccgaaaacacatccagagtgccacctgcatgccaggccttgctcagaggcctcaggcatggtatgggggccaggggcccacagatgaaccagacactgtctctttctcaaggcatcatttgttcattccatactcatccagcagactttactgagcacttactatgtcccaggctcatactaagcactttacatatgcactaaattatatcctcatcacaaatctgtaggcattcatctatccatccattcaacaaatacctagtgagaatcagctctgcaccaggctcgtgcaacatggtcaggaaacaggagtgacaaatgaaaacttagcaagagctaatattggtcagaggctgactgtgcccagcactgatttgatcacactcattatctcattcaagccacaccatgactctgtgaggtcggtctattattaccccattttctggggagaaaaccaaggcatggagagataggcaataacttaagttgctacagctaatgagtgttcaagtccaggtctatttcaccccagactcagccacacagtcctgttctcttaaagttttcagcccagtggggaagacaatcattaaccaaagcattgcatgaatgaatggcccacacagaattacaaaaggagacaagaattaagaaaaagaggtacaaacttctatgaacgcagagaaccagaggctctgaccgcatctgggagcaggccaattcttccttggtgaaatgacatttgaactgagatgaaaggataagtaggcattagttagggaggtgttggggaggggggtgttttaagcagagggaagagcatgtgcaaaggcacggtaatgggaggacacacaggagagaggacatggcaggccagtgtggctagtgtgcagcaagggaggggactggtaaggaatgagactgggacgggggcccagccatgcagggattcaggaaatagcctcatgaacaggtcactaaatcggggagaagtgtctgatggggtgtgtgcagttagagctcagaggagagggtgccaaaacctgtttctaggagggaagaaagcttttgagatgaggcagcctcctgaatccagcccagggacaatcaaaaagcctcatctatgtccctacttgttcatctctaggtggctgatccaactcttccacaaaaaaattgagtctgcgcttcgaaacaagatgaacagccaggtaggaggggctcagagccccatcagcaaacagaggagaagggcccttagtaaccacacacctcccccttctacggacactctgctgtcactccagaccccttggtagtccttatggccctttgaaaccacaaccccagctctaaaatcctgtcatgtatgttttgctgaagagtccaccaagagaccaagagacaatcacttcccacactcccagcaaactttccctcatgccaagcttgggccacctctgcttttccccagccttcctccctgctgagaaaatgccattctctttctgcctccctctcttcccatagccctgctagcctccctccaccccacccaccccaagttccttccttgatgctccccattcagaacaaatgccattgatgaagctgcaattctggcctttggccaaaccccagccatagcccattccctgaggctggaactagtacaagagacgggtatcagccagcacttcccgaaccatgcccatagcctaaacccgcaacccacatacttcagttacgggatgaggccattcatttggctggttttccattaacaaattatcagtttttaagaatcatctgagcctgtctcaaaaagcaaagagttttgcctctctccagagggcaatggaagccactgaaggttttatgcaaatgggtgacttggccagatctgtgctttacaacaatttccctgtccactgtgggaatgactggaggggccaggagtaggagcaaggagaccactgaggagtctcatgcggtcttctaggtggaagatgttggtttccttgttaaagacactgaaaatacagatggggggcatcaatcaagtgagatcatctatctgaagatactgtgtcaaaagcttaaaaagcaagaagtcaatacatgtttgtcaaaatgcataacacagtggactatagaatgggttttagagtcccatggcaagagtggagccagtggctcggttgggattagatgggacagttccaatgagcaggacattccccagccaaagtctcagggtagggtctcagggaaggttttggcttgggctccagggcttaactagctgtgtaaccttgaggaaattacttgaccttcttgaaactcagttttaccatctgtaaaatggggacattaggccgggcatggtggctcatgcctgtaatcccagcactttgggaggccaaggcaggtggatcaactgaggttaggagttcaagaccagcctgaccaaatggagaaatcctgtctttactaaaaatacaaaattagctgggcatggtgatacatgcctgtaatcccagctactcggcatgctgaggcaggagaatcgcttgaacttgggaggtggaggttgtggtgagccaagatcatgccattgcactccagcctgggcaacgagagtgaaaccctgtctcaaaaaaaaaaaaaaaaaaaaaaaaaaaaaagggtaggggggacattaataccgtcttcaccaaggcactgtaaggattcatgagataacccagaaaatgtgctcactcactaggctagctcacccacagttcagctgtctgtataatcaagtaacagtctgagaggagtgttgagatatatttaacatttggaacaattacaatgattatttcttagtaccatctaaaggtggcccctctatagcagccaagctaataagtagtaatgctgctgctgctgttgatgatgatgataatggtgaggttgatgatggtaatggtaatggtggggatgatggtgatgatggtgatggtgaggatgataatggtgatggtgatgacggtgatggtgaggttgatgatggtgatggtggggatgatgatgatggtgatggtgaggatgataatggtgatggtgatgatggtgatggtgaggttggtgatggtaatggtaatgatgggatgatgatgatgatggtgattctgaggatgataatgatgatggcgatgatggtgatgatggtgatggtgaggttgatgatggtgatagtgaggttgatggtgattatgtggttgatgatggtgatagtaatggtggagatgatgaggatggtgatggtgatggtggtgatgattatggtgaggttgatgatgatgatggtgatgggatgatgatggtggtgatggtaatggtggggaagatgatgatgatgatggtggtggtgagattgaggatggtgatggtggggatgatgataataatgatggtgatggtgatggtggggatgatgatggtggtgatggtaatggtggggaagatgatgatgatggtggtgatggtgagattgatgatggtgatggtggggatgatgataatgatgatggtgatggtgatggtgatagtggggatgatgatggtggtgatggtaatggtggggatgatgatgatgatggtggtgatggtgagattgatgatggtgatggtggggatgatgatgatgatggtgatggtggggatgattataatgatgatggtgatggtggggatgatgataatgatggtgatggtgatggtggggatgatgatggtgacggtgatggtagggatgatgataatgatggtgatggtgatggtggggatgatgatggtggtgatgatgatggtggggatgatgataataatggtgatggtgatggtggggatgatgatggtggtgatggtgatggtggggatgatgataatgatggtgatggtgatggtggggatgatgatggtggtgatggtgatggtggggatgatgataatgatggtgatggtggggatgatgatggtggtgatggtaatggtggggatgatgatgatggtggtatggtgagattgatgatggtgatggtggggatgatgataatggtgatggtaatggtggagatgatgatgatgatgatggtgatggtgatggtgagactgatgatggtgatggtgatggtgatggtggtaagtatacaccgatttaataggcattttcttcctccaaggcaggagctcatcctgggaagtttcaatggtgatagcgaggttgatggtgatggtgatggtggggatggtgatgatgttggcccatataatatactgagtgtttacagtgatctgacactatgctaagaactttttccatggattccagcatttaatccacacattctggcatttaatcccctgtgagagagattccatgattatccctattttacaggtgagtaaactgagatacagaaagtggaagtaatagtgcttggattcaaatccaggataccctgcctcagagatgagcctctctcttaaccataagatccaatttagaagcaagtactggcctgaatgaatgaatgaaggaatgaaatgtcatgatgccaggagggtctggaaatggtgagaagtgagccagggagtctgcccccagggaatacagcatgtagggctggtgtctgagggaaggaagagcctgcgtcagtacaaagtgtgcatgaagggaagagcagggagggagctgggatcccaccaggatttgctgcgatctggagccatctgttggccctgatgggtgagcaacactgatgacaatgcctgaggggcagctcaggagtccagcagggcctcagctgccagctgtgctgtcctctgttcctgggtcctttggaaaagaggtgcaggttccttggagaatgccagtccaggtcctcttaggacttcaagagccttatgtggtagaaacacacttcagggaaaccaaattttctccttccctccttctcactgctgtcttccctccttccttcctttctttccttcttccctccttccttccttcctttccttcttcccactcttcttcctttcttttcttttcttttcttttttttttttttggtgatgaagtctctctctgttgcccaggctggagtacagtagcacaatctcaactcactgcaacctccgcctcccgggttcaagagattctcctgcctcagcctcccgagtagctgggattacaggtatctgccaccatgcctggctaatttttgtattttttgatagagacaggaattcaccatgttggccaggctggtctcaaactcctgacctcaagtgatccacccacctcggcctctcaaagtactgggattacaggcgtgagccaccacacccagctcttcctttcttttctccctttcttccttccatccctttctccttttctccctttcttccttccttctttctcttcccctcttccctccttccccttttcttccctccataccccaggaaaaataacttgattggcagtgtagaagaaggggtaggggaggatagaggtgacctctaggcagatggtgcagccaaccctaaggaggattaagaacctgaagagtttggtttgggatgtgccagccttggggaccagtaggacacacagggacagttgtccttgaggcagctgggtccccaggctgaagctcagaggagaagcctgggctgcaaagtaaggcctgggtactggccacatgttgggagcagtggaggtgactccgcctgggatcccaaagacagatgctgagtcagggtttgggtgcaagtcatttattgggaggggttcccaggcagcgcagtgaggaggtcgggaggcagggaagggcctttactgagtgggttgctgctatgggcaactgggactcagtcctgctggcaattctcagaggaatggtggggagcacacctcagaattgtcccagaagcgggaagaaggctggggtatttgtctaccacctcctacccttctttcattgaaggctgttcttagggtcctaactgcttggcacttctgagcacagtccagagagtgtgggtgaggcgctgcagcatctgccacaggggccatggggatgcctgaaatggctcaagaagagggcctaagtggaagggacagggagccaggaagaaagcccagagaagctcccacatcttcagtgaaggaggaagagcttgcaaagaagtctggggaaaagcctgcaggggataggaagaaagtggaaggccttggtcacaggactctagaaggagtgtttctagaagggaatgggcaaccacaccaggagctacccagtagtcaagaaatgcaaggactgaagagactgctggattactgagggaaaggtcattcgagagcaacatcaggagagggagggaaggagcttgtctgaccaccagccccagccccaatctcttagtgaggagaagcctgtggtttaaatcctatattctagctatctattgcttgaaaacaaacaactcaaaatttggtatcataaaacaaccaccattgttaacattcatggattctgtgcatcaggaaaaaggcatgacagggatggctaagctctctgctccatgaggtctgaggcctcacctcagaagactcaaaagttccatgttagaattacctggagagttcctctctcccatctctggtgcctgggctaggaagacttgaaggctcagctctgctgggactattgacccaagccacttccatggtctctccacagggcttgggcttctcgtagcattgagtgggttctgcacagccttttatgacctcacctctgaagttacacaaaggtcaggtgtattgttgtgttctgttgcttagaagcaagtcggcaagcccagattctagtggcaagttcacagactccatctcttggtgggggtgtggcaaagccacattacagaagagcaaatggaatggaaaatgtaatttgccatgttccgttttacagatgaagaaatagaggtctagataaatggaacaacttcctcagtgtcaaagtcagtgtgtggcccaagtcagattttctcaggctagtgtttgttccattgtgagtcatgggctaggggacagggggattggggtggagtggcaaaggcaggtagggaatggcttctctggccatacataccaaacatgagggtgcccacctagacttaagcagaaacactgcccatgctcccagaagcccaggtaagggaaggctggccattgactacctcgtatttgtttattacctcattccacaaaggatctgagacagcaaaatcaaacagaaacaaaagaaaaaacaaaacaacaacagcaacaaaaaaaaaaaaccttataaaatagaaaacataaaccctcatcagttccacacaccagggcaggaaatagaatgcagttatgtgggccatacagtcatatacagttattatttctaagctacatgttcaactctgagcttcctggtggccaaaaagaaaagggaaacttgattggctacataattttcaagaaaacattcaaggaaagcaaggcatatctggcccgttattgtcaagggacatttttcactatgggaagaccttactgattacttgtttggttctccccaggtctgcgagaaagtgaccaattctgtatcctccgagctgcaaccttatttccagactctgccaggtgagggctggatgaagatcaaggatagaaaggaacagaaatgggagggggtgaggacgtcagggtggatgtgatggggccggcaagtttcccagacagccctgggcctgggtgggaatgagcagagtagtacattattttcaagaggcagctagcattgggtcaagtccttgtgctaggtccagaagtgaggaggacaaacagcccatactacctcattccctcagctctgcaagggccaaacaacaaaatacccccagctctctgaggccagagacacatgactggcctgagatctgatattggtcacttctttttggatctcagtttccatgtccttaaaatggggacagtaatcttcacccccaagtacttggcaagctgcaaagaactgtggcaggcactcaggaaattgtccgctctcagcctcccaacactcccctgagagaggcattattctccccgttttacacaggagtaacctggccggggtcacacctgtaatcccagcactttggaaggccaaggcaggcggaccacctgaggtcaggagttcaagaccagcttggccaacatggagaaaccctgtccctactaaaaatacaaaaatttgccaggcatcatggcaggtgcctgtaatcccagctacttaggaggctgaggcaggagaatcacttgaacccaggaggcggaggttgcagtgagccaagatcatgccactgcactccagcctgggtgacagagcaagactctgtctcaaaaacaaaaaacaaaacaaaacaaaaaacacatgaggaacctgaggctcagagagtaggtgagacttgtccagagtcatgaagccatcaagaggcagaagaaagatacaaatctggagctaagatttccttcactccagagcctgggctttcagctgctctcaggactaccttgctgtaaagcctggcatggttggcacatagtatatgcccatttaagaggcattttcttcctccagaacaggagcccatcctgggcaggttcaatgcagctgcagtgcccaaggtttggcctcaagaggcaggaaaaagattttggtctgaatgccagcttcatcactcaccaaccattgaacaacttggatttctgagccttggtttcttccctgctaactgagaaaagggatatttatttaattctcattgattactactgggaaacagagaaactctccagacttgagccagccagggcttagccttgtctattatcaatgatcctaacaatgatcctctctggcttctgagcctctgcatggacagggcattgggcatccacctcctctcaaaaccctcccagcatctgtgaggtcactaggattctctctgttctacaaatgacaaaaagtgctcagagaagtgcaaggacttgtccaaggtcatccagagtttggttcaagcctaggtctctctgtgcccttgaccctgtgtcttagcgactcatctcagggctgttggaagaagagagtaagggggtgtctgtgaatgtggggtgtgggttcattttcccttaaggcgagctcccttaaggagagctccctggagaaggtgggaatgaaacttgcactgcagctcttgattcaattttaggggattctgatcctgcatttcagcttccagcgatgctgccgtgggagccagctcatggtccattttctttctctctagtaatgaccaaaatagattctgtggctggaatcaactatggtctggtggcacctccagcaaccacggctgagaccctggatgtacagatgaaggtgaggctgacactgagaatcatacaccctcacacctctgtctcagacactccagggctccccagtccttggaaacaaacttaacaatgtcccctacttcctatctgactcaccaccaccctctctactctccccgcctctccctgctccagtcacactggcctccccgccattccccgaaacacaccatgcctgccccacccccctccaaaggcctttgcccttgctttttcctccgcctgggtactctcccccaggtttccacacagctctcccttgcttccttcaagtctttgctcaaatattccctccctagagagaccttcccagaccactctcgctgaaatagctctctcctcttcccccacatcctgctttattaccaatacacacacacacacacacacacacacacacacacacagagtctctagtctgtctccctcactatgatgagggagaaggggctgcgactattttgttcactaccacatgtgcagcacctagaccaatgcttggcacatactaggtgctcaataaattatttgttggatgggtggatggatggatggattagtggatggatatatggatggatgggtaggtggatgggtgggtgggtgggtggatggatgggtaggtgggtagacaggtggatgggtaagtggatgggaggtgggtgtgttggtgggtggatggatgggtgggtgggtagacaggtggatgggtaagtagatgggaggtgggtgtgttggtgggtgggtgtattggcggatgtaaaggtaggtgggtgggtgggtgaatgaatggatgggagggtgggtagatgagtgggcgggtaggtggatgggtgggtgggtgtattggtggatggatggatggatggatggatggatggatggatggatggatacatggatagatgggtaggcggatgagtgggtggatgaatggatgggtgggtgggtagatgggtgggggtagatggatggctgggtggatgtattggtgggtggatggatggatggatggatagatggagttttatttcatgctgctccctcccttactcaccaccctccaaccagacacactggccttacacttcctcaaataggttaagcttcctctcacctcagggcatttgtcctagctgttccccctgcctggtactcctttccttcccaatgcccacctctaccccgctggcttcttatagtaccatgtggatctccactcagctgtcactcccagagcagccttccctaccaccccagcaagagtgggtcccactctgaaattcatcctggattgtgcctccttcagtccttccatattggtgatttgcttgtttgtttacagttatttgtttgcttcaaaacacattcaatgtgaaaaagaaactttagaaactgcagaggaatgcagaaataaatataggaaagaaggaaaaaaaagagagagagagagagaattacccgagtctacaacctagagataagcatcatcaataaataagtgtagatccctccaacccttgtctttgcagaaacagaggaagatacacacacacacacacacagagagagagagagagagagacagaaacaaatgtacacatatatagatacaaaaacaaatacacacaaaacccacaatatagaaacaggaaaaaatgcacacatatgtactcacatatagacaacaaaatacacacagacatatattttgcatgtgtcatattatatattctgctttacaactttaaaaactcaacacgtatcataggaacatctttgccatccatgaaatgtcctcttgcagccctttactggctgcttggattttcagcggacagcttgtggtaatgtacgaggacagtgccccctcctgggacacttgggctttccatttttttttccacaaacgtaaccaaagctgcagtgatcatccttgcaatcgtgtctctgtctatccttgagtatttcctagaagtggaattgctagaccaaatggcatactaagaaaaaaaaatgaatacccacatatatctaagtgatacaacagaccaaaagattaaaacaataagtaattatcctcagtgaataagaaaggtcttgtttatctcctgggctcctgcccagagttgatcactgacaaccatggagtgtgttaacctcccaggtccctggttctaagcactcacataaatgcataagaaaatccatctagattttgctgatgctctacatgaatggatacacactgttcttccacttgcttttctcacttaacaatatgtattaaagataaatcctagtcagtacataggtccatctttattattattatttgagatggagttttgtcttgttgcccaggctggagtgcaatggcgcgacctccactcattgcaacctctgcctcccaggttcaggcgattctcctgcttcagcctccggtcactgggattacaggctcccgccaccacgcctggctaattttttgtatttttagtagagatggggtttcaccgtgttggccaggctaatctcaaattcctgacctcaggtgatgcacctgccttggcctcccaaaatgctgggattacaggcgtgagcactgtgcccagcccatcttattattattaagagttgcatgtattccataatatggaggttatgtttgttaattttaagtaataaaataattctaaggtacagagaatgctatacacttccaagtacccaacacacagatttaagagatcttaccattttgtcatatttccttctgatttttaaaaaaatttaaaaaactgtagaaataactaacgaggcccccttgggtgcctctccccccaccccagaaccatgttgatgatgttggtgtgtgtcctttttgcctgtgtttttatactttttatgggcctttaaattttacataagtggtatcctaccatatgtatccatctataatttggttttttaagctcaacatttatttgctaaataaatgatctgcttttgcaacatattgccaaattgcttttcagaaacataaagaacaaccttaacagcttatgagtgctctcaccaaacactgggtagcatcagtttaaagcacacacgactctcaaaacaattttcctcttttcccattttgctaagtttaccgacgaaacaaacaggatttcactgttcttttcgtagggtttctgtgcttactagcaaggttgaggttgagacaatggagtggttaggagaacgttcactggacattggaggcctgggttcaatttctggctctgccacttaccagctgtgtgaccttgggcaagtcacttcacctccttgtgcctcagtgtcctctcctataagatgagcataattatacctgccttcccaggactggcatgaaaggcacttagaaagtaatgcccaggaggcttttgatgctactgttagtttctggtcattgctttttcctttgcaagtgtacaattggtgtcttcagtccattttttcctggatggagatgttgacttataattcctgaagaatatctgggctcactctgttgcctctacccccagggggagttttacagtgagaaccaccacaatccacctccctttgctccaccagtgatggagtttcccgctgcccatgaccgcatggtatacctgggcctctcagactacttcttcaacacagccgggcttgtataccaagaggctggggtcttgaagatgacccttagagatgacatggtaaggccgggctctgggtgggtgtgggaagagcactggacccagaatcctgcagaccttccagacaaatctggaaaaagcttttctcacattggggtaggttaaagtgttgactctagagtcagctagagctgagttccaatatcggccccacccctctccagctgggtgacccaggtcaattactgtacctctcagaacttgttttgtcatctgtaaaacaccaataactggctttctccaaagggtgtcatgaggattcaatgagatagtaatgcctgattaaatgagatattagtctatgagaggaccgaacacagagctttgaatgtaggaagtgatgaataagaaacataagggctacattgatgagtacttgtcagattctgtcatccagtcctagcaccatgctaaggcagaggcagacttcctggaaatggggcatcctatgagattggtttgcaggcagattgggctttctcaggagcaaaaaacaagcaggcggtcactgaccagctcctgaccattctgggccaactgctgcagaaggtgtggtttggcttccaggctggttgctgcagaatttgtgggtcagtgctctgttgtcacataggggctggccactgtctgtgtgtgcagtcagcctctcaccccgatacagaactcaccccctctgctccgtctgtaacagcatcctccgagatccttttctcatctcttgctacagattccaaaggagtccaaatttcgactgacaaccaagttctttggaaccttcctacctgaggtatggaagaccttgctttcctttagtgagccccgggggttctgggaggacagggctttgctgagtggatgatgagagccctccacccaacataacacacacaagatccagaaacaacccagcatgaaagggtggaaatagcttcatccacagaacagagaaaagctccaagcgcccagttgaccaggtgtgggagtagatgctggcaggaggtggagggagggtctttcatgcaataaattcttattgaatgcccaccatgtgcctggggccctgtgctgggaacccagcagaatagggcacctccctaccctcctggagctcccagaccagtggagagagaaaaatatcatccagatatccaaaacaataacaaaaatagtgtggactgttaccagtgaaaccaacaggtggatgaggttactttagacaaggtggtcaaggacgcctctgtctttatctgctcaggctaccataacaaaatgccacagacctggtggcataaacaacagaatttatttctcatagctctcgagactggaagttcaaggttaaggtgtcagcagatttggtttctagtgagggctctcttcctggcttgtagactgcctccttcttgtgtcctcacagggccttttctcaatgcatgcatggtggcgggtgggagagagctctctggtgtcttttcttataaggacactaattctatcagatcagggcccaactgttatgaactcacttaacctcagttacttcgttagaggcccttctccaaatgcagccacactgggaattagggtttcaacatatgaatttgggaggacacattctgttcatagcagtgtctctggtggtgaaaccccagaaatttctatacagagaagctctggttggggggagaggtgtggctgctaggggtgtccaggagtgttgtcttgaagcttcatttgcataacaatcacattatttttactcagactgtgggtttacctgggggaagatcagagactaagagaaaggggaagaaggtcacaaaggccctccttagttcccccttgaagccactactgctgtctgagaaagtaacatctgcagagacctgaaggaagggaaagagccgagagaagaatgcgaggaaaagtatctaacaatggggaacagagagtgcaaaggattttagatggcaagagagcttgttgagtttggggcacagaaagagttccatgtggccagagatggaagacaagaggcagaggtacatgtggtgaggttggcagggtgccagctggcagactgtgcaatcttaggatttattctaagagcaatgggaagacattgaaggtatttaagtaggggcaggccaaggtaggattcagaaacattttaacagaaactcctcctttcgttgattgtctccactgggggctgcaggtggccaagaagtttcccaacatgaagatacagatccatgtctcagcctccaccccgccacacctgtctgtgcagcccaccggccttaccttctaccctgccgtggatgtccaggcctttgccgtcctccccaactcctccctggcttccctcttcctgattggcatggtaagcagttcctgggttggacagatgaggagccccagacagtcccaacagcactgtctttggagtcaggagaccatgtgaatcctgtctggattcaaacctggactgtgtcactccggagcctgaggcttgagtcactgtactcaatggtgccgactcctggaggtattcattcacccagccattcactagtgcgtttgtttacttattcattcaattattcattcagtcaatttctcattcattcaattattcattccatgttggcttgaaatatgtgtactgttccaattcatccatttatatctttagtcattcaattatgcatttgtgtatttgttcattcattcaattattaattcattcagttatttattagattgttgacttgaaatatgttatacattttctgattcccacttgcactcatttattcaattattcatttacttatacctttgttcaattgatcattcatttgtatatttgttcatttattcgtccatcatttattcattcatgcatatctttgttattcttcaattcacatattttttaatccttcatttgcctcagttttcactccattgttgatttatgcattcatccctttgatcactccatcactccgcaaagatttggtggcacccatatggccactgagggtgtggttcagacactctctgcaccaggaagcacttagaggccttaggcaggtctactgggtctcccaagctgagacctgttattcccactttgcagacagaataggtcctaagaggtcatccaagaccacacagactgcacagaacagctgaggtgggaaccggggacttccttctcatattttttgaatgaattaatgaatgagggattgtgagaatggggctggcctgtcttatgcagcctctccgagagtggcccaagaactctgaaatggtcctggaagtagagagagaaaatggaaattgacagtttaggactcaacagccacaaagccaagggaagtctccccactcctctggctctgtgggcctgaccccacagtgtatgctgccctgctgagccgttgtgaagctgacccttcttggtttggaggccttgcaatcaggtgcctgggtcagggcacttcaccctgggttgttgttttggcagcacacaactggttccatggaggtcagcgccgagtccaacaggcttgttggagagctcaagctggataggtaagtgggcctgtgagaggaggagggggctgcccctctgtccttggtgtctgtgggatgacagtggtcctgtgatatacagaagcactgcattgttgttttcctgttggctcatcacattaaaacctcaaagagtgtgcgatggccacagtatccccattttgcagaccatgaaactcatgctcagagaaaaagtgacttgctcgaggtcacacattgtaggtgaccaaccatctcagcttacccataaatgtcccggttctagcagtgacagtcctgtgttctgggatatggccagtcctcatggctgggaggcgtcagctgatgatccccactgaaccacaacagcatgcagccactgcacgtccctggctttccttgacactaggagatcccgcttcaacttcttctcaccccatccttgggactttaaccaccatcctctgctgggagactctggaatccacatggccctgatttgagtcccagcaagggagtttgtggttaggagtgtggccccaacatgaggctgcctgcgttaaaagtgtggctcaccttggcaagcaccaaaacgctgccaacttcagttctccgactgtcaaataagcccagtaaggccaggcgcggtggctcacgcctgtaatcccagcactgtgggaggctgaggcaggtggatcaactgaggtcaggagtttgagaccagtctggccaacatggtgaaaccctgtctctattaaaaataaaaaattaactgggcatggtcaggtgcctgtaatcccagctactggagaggctgaggcaggggaatggcttgaacctgggaggtggaggttgcagtgagccgagatcgccccattgcactccagcctgggagacagagtgagactctgtctcaaaaaataaaaaataagcccagtaattactttgccaacagcattattgtgagctgaaatgaggtattaatatgtgttgaagtgtttagaacacttccagggatagaataaacactcaatatgcaagagggaaagagaaacagaaatgcagaaagagagaaatacagggccaggcatggtggctcacgcctctctcccagcaccttgggaggccatggtgggaggatcgcctgagcccaatagttcaagactagctggggcaacatagtgagacctcgtctctaccaaaaaaaaaaaaattgttttaattagccaggcatggtggtgcatgcctggggtcccagctactcgagaggctgaggtgggaggatcacttgagcctggcaggtcaaggctgcagtgagccatgttccagccactgtactccagcttgggcaacagagcaagaccctgtctctaaataaataaataaataaataaataaacaaatagatttttaaaagtaaaagaaatacagaaagggagtttcagacatagagaaagagacagagacacagagagtgacactcagagaaggagacagacacaaaggaaggaagggaggggagagatgtagaaaaggaaaggtagagaaagagggagacactcagagaaacagagggagggagtcggggggcagagagaaagagacaccatatgcaagcagatgtgatggccccccgcagttagacctggcacccgcctcttcagcacatttgcgctgttttcacgccgccttgacccacatccctgcccagtcccgccctctccctggcaccaagtcgtccttcttcaccttgagacgagccccagaggtttatgtgctactcatttctcctggcatcatgttgacaagcattactgcttcagaaacgtatagatttaatttctcttaaacacccatgggcctctaaagtaaaggagctggagaggatacagctgggtgtgggctgagcacaggctttctggaatatgcaggggatggggatagggtatgagaatccacggagcagaaatcctggggctactgactcttgaggagcaagggcaagtttttaagctttgtacagtgttggagacaaccaaggctttgccttcaaggagccctgttcgaaaccctgctttattttatttatttttttttagacagagttttgctctgtcacccaggctggtgtgcagtggcatgatctcagctcactgcaacccctgcctcccgggttcaagcaattctcctgcctcagcctcccgtgtagctgggactacaggtgcgcaccaccacacctggctaatttttgtatttttagtagagacatggtttcccatgttggccaggctagtcttgaactcctgacttcaagtgatctgcctgcctcagcctcccaaaagtgctgggattacaggcatgattcaccgtgcctggccaaaactctgctttattatagcctgggcaacatagtgagaccctgtctctacaacaaaatttttaaaaattagctgagcttggtggcatacccctgtaatcccagctacctgggaggctgaggtgggaggatcacctgagcccagggaggttgaggttgcagtgagctgtgattttgctgtgtagtgcagctgtgactacactctagcctgagctagtgagaccccatctcaaagaagaaaaaaaaaagcaaaccgtgctttgctaattgttagctgtgtgaccttggaccattgtttgatctctgagtatgtttcctcatctgtaaaaatgagagtaatggcccttgcctcttgtaatgttactggtattcagtgggatagagcgcccaatacagctaatgaatggttggggttcaataaacagccatatgttccccccttcctctgagatcactgttaaaaatgtcataaaggccttaaagggaaaatagtatattggctcaggtaactgaaaaatccaaggctttcagtcaaggaaagacccaggtgctcaaatgatatccttaggaatctgtctccatctcttggctttgctatcctctgtgctggcttcattgcccagcaggctgtcaccaagtggtggcaaaatagtcaccaggagcttccttattttcccagagaaaagagaataccttattcccaatattcccagcagaagtcctgggactgactttcattgggccagcataggtcagaggtacatccttgcagcaatgactgtagcagaagaagtggactatgccctttggtcagcatggcccagagctcagtgtggggtcaacggcactaacaatgcagggaatgtgtgaattctccaaaggcaacatcggggggctgtgacccgtggaaggggagtggatactgggtgggaaaaccagacagtatccaccagagtgggtctctcctctctagagactgggttctcatgctagtcaggcaattggtggtctcagtcccctcctccccctctcacaggctgctcctggaactgaagcactcaaatattggccccttcccggtgagtctgaggcccttggtggcttcttcctccttctgacctggcggcggggagggggacatgtcataggctcaaggcattatttaagaggctactggctcatttgcatttaatttggttgtgaattaatagttcaaggagcttcgtgggcagagggacctgagccagaatccctgctccatacttactaactgtgaggccttgggcaagtcacttcccttttctgaactccagaccttccccacctgagtgagtgtagtatggtttaaatgggattaaacatgcacaatctggtagagaaaatctgctcaacaaatgtttgttggatgaacaaatgaattactttattgagcacctattatgtgccaagtactcttccaagtatggggtaggctgatgcatcagacagggaagtgatgccttctcagagccttacatggcagtgggaagacagcacaataagaaatgaaaggccaggcatggtggctcatgtccataatcccagcactttgggaggctgaagcaggaggactgcttgaggttaggacttcaagaccagcctgggcaacatagcaagacctcatctcttataaaaaataaaaattaggtgggtgtggtggcatgcacatgtagtcccagatacctgggagtctgaggcaggaggatggcttcagcccgggagttccaggttacacaagctaagatcatgctacactgcactccagcctgtgtgacagagtgaaatcttgtctcaaaaaaaaaaaaaaaaagagagagaagatcgtttcagtcacaatcaaagctataaaaaccaaagcggggatgggcggaaagtgatgagggagaatgaagagtcagaagatgtgatcagggagggcctctccgaggaggtgacgtttggactgaaggaggagaaggagccagcagaggaaacagcaggggcaaaagccctgtggtagagacaagcttggtgcgtttggggaatgaagggagcctgtgtgtctggagcagagcaagtagggggcatcggaagagatgtggccagaggggcaagcacaggctagctcatccagggtcttccgggctgagctagaggaggggagattgttgtgttgcacaggcagtgagaagccggtgcgctgtttccctgcagggagtgctgtgagtctatttatacctttgtaaaagcttcccctggctggggtggggggatagattacagacaaggggtcattgaggaggctggtgtgtttgtccacgtgagatgctggaggttgggactcagccaggcagaagagaaagatggtggattggagatatattttggaagtagatttagagagaccttagtgagagatatgagcctcttttataaagtgcatttaaatatttaatgaatattttgcacaccttcttttgcacccagcaccatactaggcacagtggggtataacatgtggtcaatgtctggcagatttagacacagcacagaagcctccctcatggctgtgtggtgagggaaaggattgtccaggtgacttctagggttttgggtggagcagttggatgaatggcagagctacgtactgacatggagaaagggctggtaggagagggaagagcagggagaaacccagctcaagtaggtggttcgcctgcccaggaatcactgctcatcattaagtagatttgccgctactgccctcacgaggggcattgatgacgagttgcccctgttagtagtaagtagtcgcccatgctgttcaacaccagccacacagagcacctgccctgtgtctaacgtcagaagctgcagtctgctgatcctgtccagcgtcttgctacattgacctgaatctcctggtgggctctggttgaatcccagtttctgctgctctggagaacatttccttagattcccgagatgcccccaagttccccaccaagtgagtgccttgtaagccctccaaccccaaagtcataccgtcccagtgtccccttcaaatctgataaaaatccagccagccatttctaccaaatgagattccaaatgaaaggaccaaatgcaacctcactgtattttcatggacttactggttccaaggctttcttggtggcttgactaagtccataactaatttctacttctgtagaaactagaaattttaagttcccaggattcataggaaggagggcactgcatttggtgaggccagggaataacaggccaggaaaagagactcagttgttccagaaacaaaaatgtatatatttacaaattgtaaatgtcacaactacaggcaagcatcttgagggttttacactatttttaattttttttattattgccaaagaaaaatatatgcactatagggcaatcagaacctacagatttgcaaaagaaagaaaataaaaaccatgcatattttcatcacttagttaataatttggagtatatccttcctgaccttttgctatgcctatttaattaaaaaatggaatgatgtgatttctatagcctggttctcctcactcaaaaacatatcatggttatgtctgtgttgttacttacatttctacaatatcattcttaacagttgcataatatttccttgtattaaagtattaccattttccaccaagtgattcccctattgttggacatggagattgcttttaatttattgttttggataaatttgttgctttggtcaacattcttgcatccacattttttcctacaccctacattatttccttaggataaattcctcagaggcatgtttgctagcccaaaaggcacacgggtcttgctgtgttgcccaggctggtcttgaactcctcctggtctcaagtgatcttctcgcctcagcctcccaaagcactgctgttacagtcatgaaccaccaagcccaaccaggcacacacaggctttggaagaacattgtgccaaatagccgtcaaagaggttgatttgatttgccctcttactgcagtgtctgagaggactcattttttaagctaagcttttcccatttaaatactctctgatgagcttcctcatgattgtcgtgagttgtaaggccttgcaccttacaattgagaacatgctttacatctggaaccattggagcaaaagaaaccacttccatgaccttgattgggctgccaagtattcacatatcacttgcgtccacctctcagcagttttcccaactgcgcggttgctgagcagcgctaggggaaaggagggtgacagaggtggggtgatgaggactgctggacccgcaaggttctggcgatgcagggccatcctcccatcctccctctgatttccaggttgaattgctgcaggatatcatgaactacattgtacccattcttgtgctgcccagggttaacggtaaggaactttgaagaaaccattcattttcagtcatgggggaagagggtggggttgattacccacagccacctgttacctggccccaggtatgagggctgggcagtggtgatgtcaagtgaacttcaaatggcatctgacccagaaatgaatgcaacaaaaaggaactcacatgagttgacttactacacatgggttgattcattattgcgtgagtttgtccttacaaaacccccatgagatgaaggattattaacatctccaacttttatggcaggaagcggaagaacagaatggtttagtgacttaggtcacagagcaggcaagagatggggcatgggtttgatcctagcagtgaaaacaaagcccatggtctctttccaactttggaagcaggatgagggggttccctgataacccctcccagagcttagatcaccacgctggtaagagcttcaggcaggccggcccctgacctttgagagtgaggggcaaaagtactaatagaggcccatataacctgtgactaggatatttagaacttaccaattaatccaacaaattatcatatgaaatatgatacatcagtcctgggatctgtcctcctaccttgacaaatgtagctttgtaatgacctgggaggccacgttctaatttagagttctccaaagttccgtgtcagaatgtggcagtatgtggggggcttgccctggccactgtccacctctggctttatcctaaatgttgaggggtttcatgctcacatgcataaatacccctattacacaccacgctctagtcacaccattgcaagcagcagatttttggtttagtgtataccagcagtgctgcaccctcaggagggccatcatggggatggagtccacgcaggtgctagaagtggacttggggttgatggacaacaggtgggaggtacggactctggggcagccttcctttcaggcatgtatgcccatgccagtccctacctagggccaggcatgctggttcagggaggctgtctacccaggctctctggccctccctcctcccctgcccttctctttcttttctcctggtcctcaccatcggtctctgtcacagagaaactacagaaaggcttccctctcccgacgccggccagagtccagctctacaacgtagtgcttcagcctcaccaggtgagtcccggagtcttttccacaaatctcccctaacgatagtgaccaacagcagcctatggctgcaatgcttcctgcatgccaagccctgtgtgaagcgccttctacccttacaacaactctgggatgtgggtgctgttaaaaaacaaagaaagaccaaggttcagaaaagccacacagtgttaaatgaagtccagattcaaagccaggctcccggctttgaaccatcactgcatcgttcccacgctacactcggcaaaaatgaaatgcatttgtgggccaaagagcctcttttttaaggtgcatttaaatatttaacgaatatatgttgcacaccttttgcacccagcatcatactaggcactgtggggtataacatgtggtcgacgtctggcagatttagacacagcacagaagtctccttcgtggctttcgcccaggctgacttccgtctgcatttgacactgatgcgcttcctgggcatgctttcttctcttagtttccagcactcccctagctcttggttgtctacctgccacctcctctgcttgttctcctgccccttctctgcaagctggagatctccaggacccctccccaggcctcttctcttcccccgccattggcaagccttcgtcactcttgtcaacctcttcaggcttagctgccacctgcgtgccacccaatgtcccagacatgcttccagtctttttattttttccaaactctcagcttgtgcattcgcaggctccctcaatgtctccaccctgaggcctcttaaacccagcatgtccccacaaagctgtcacctccgcagcgaaaccgtcacccagcttgcatttctcaccttggtcaaaggctttcctgataacttgtggccctcctggggagcctcgcatcacccagatccctccctctccctttcccccaatgtccaggccatcaatcctcaattctttagaccagggagctaattaatggggctgagagactgtagaaaaataaccaagagtgcagaggaaacacataccgcatattcctcacattttaccaagttcgtgttttaaaaaaaatgacccatggcacaatttaatttcttcatttctaaaaatcctgagtgaaggacacaaagaagcagagagaagtggttttgcagccttgattggaacaagcactcccttgagctgccatgaggcagggacgacaaatgaaggcctctaaaacagcccggggggtctccgtgtctaagaaggaggcagcttccagggaagctgctgacagattcgcagatgttggcagctgtggatgtgtagatccgggcagcgaaacactgagtgacccccactggccctgcctttctccttcctaagaggcaggctcccaaaatgtccttcttaaaactccagtagctccacactcacaaacaaggggtgcatcttcaactggtgacaacattctcatctctccctagaacttcctgctgttcggtgcagacgttgtctataaatgaaggcaccaggggtgccgggggctgtcagccacacctgttcctgatgggctgtggggcaccggctgcctttccccagggaatcctctccagatcttaaccaagagccccttgcaaacttcttcgactcagattcagaaatgatctaaacacgaggaaacattattcattggaaaagtgcatggtgtgtattttagggattatgagcttctttcaagggctaaggctgcagagatatttcctccaggaatcgtgtttcaattgtaaccaagaaatttccatttgtgcttcatgaaaaaaaacttctggtttttttcatgtggattctgtgtgctggtattgtttcttgttttatgttcatttatttattattcattggctgtaaccaatgtggccggcagtgccagtttacagcacagatacaatcatctctttttatttctataattaatctctggaatccccacagcctccattaacagaaagtctcattgttccaaatgtccttgtgattttcttagtccaaattcctaatgtcacacagagagggtctggagagtgggtcagtccactatgctgttgttctttccactaccacatggtgtggctgttgacccgtcattctgcacagcccattgtcctgtgtagtcacctgtccactaggactgttgctcccgtcactaccacacggtgtcgctgttgaaaagctagcctgcacagcccaccttccctgccccacacttgggctccccgtttcatccatgttctcctgcccagccattgtccccaaaagcagaacaatgggccaggtgacagagtccattggggttttctgcttcagtcacatctttgggtgcaattagcacttccccatgactctcccagctctagtgtggaagccagatcaccaacccagactgtctttggaattctggggagtttccttgggggctttgggccatttcctgccatgggacatcagagggggctatctcagcccatgagatggggttttatggattgtacttcagattgattgaggagtcctggaaggcctttctacactgctgacatgtgctctgagaccataaggatgagcaacaacacactggaggagttcgatgcagacggtggagtgggggaccacatgaccagatttagtttttaaaatgttttattgtgacttctgaaagcatcagaaggacaagagggcaagggatgagcacaaattaggaatgtgttgttattcaagcttcaaccagattggtgatggtaaaattgaagagaagcatttgtagcgagcaaaagcagataaaaggtatttattttatttataaagaaaaatgtacacacttctgctgacatcattgattctctgtcaaatggagttaaaggctctagggccacacaagaagggagggccattgatcaaacactctcaggagtcaagcaaagggcatgaatgatctaatttaatcctgatagcattcttcatcccccaagatggcaattgctcaaacttttttggttgtttgtttttgagacagagtcttgctctgtcacccaggctggagtgcagtggcacgatctcagctcactgcaacctctgactcccaagttcaagcgattctcctgcctcagcctcctgagtagctgggactacaggcatgtgccatcatgcctggctaatttttgtatttttagtagagatgaggtttcatcatgttggccgggcaggtctcaaactcctgacctcaggtcatctacctgcctgggtctcccaaagcgctgggattacaggggtgagccaccgagcccagctgttcaaacattttaaattgagttacccttccctgatcacatagccagcaggtggcagagttggaattcccaccttatctattcccacatgtcagagcccatgctttttttgctcctccccgatgtcaaaatgttgtctgttctgggggacttggcacgtttaaagcagaacttctttgttctgtggcataggttgtacactgtaaaacataggttgtaccaggttgaggaaacaaaagtctttctctaatttgtccaccagtagtatgcatctttttctccactagccaggggctatggaggccctgaatagaacagaagagcagctagcaagggcggaaggaagagagagaagggaagcacagcgtgggatagactgggaggccatgaggactgttaagggctctaggttttgttccaaaagataaggcaagccactggagagttttgagcagaagaatgttacaatccaattcacatttgtaaaagagccctctggctgctggggagactagctggtagatatggacacacacctgccatcccccaccctcattctctttggagttaacccccttctacacctgccctctactttctgtaacatataggcaccccctgctccacactctatagaaaaaaaaaaaaaaatgcaattattaggttggtgcaaaagtaattgcggtttttgccattacttttaatgcaaaaaccgcaattactttttttttttggagacagagtctcgctctgtcacccaggctggaatgcagtggtgtgatcttggctcactgcaacctctgcctcccggattcaaaccgttctcctgcctcagcctcccaagtatctgggattacagtctcacaccagtacgcgcggctaatattttgtgtacatatatttttaaatatagacagggtttctccatgttggccagagtggtctccaactcctgacctcaagtgatccacccaccttggccttccaaagtgctgggattacaagtgtgagccactgaatccagtcttggccgttacttttaatgccaaaaaaaataattacttttccatcaacctaaatctttcttggacctgaagattggtgcatgaaacacattgtgcctgcgaacttctctctaatggctgaggaaaggcagttgcttgggggttagggtttgagcagcattccccaacacactccaaaggttctgccaagttggctacagaaccactatttgagcagcttctcccttcaggctaagcattgtctgctgcagatgactgcaaatgtgtgtttggggtttctttgggtgacgttgaaaatgttctaaaattaaattctggattgtacactttaaatgggtgaattttatgtatatgaaatatatgtcaataaagtggcaaaagacaattgaagaagaaaaaaaagaattgttcactccaaactgcctaaaagctcaccatcagagcagcttcccttctgggataagcacagccttcctggggttccttttggaaatgctgacttattaaataaatatgagggaggagtaccctctgcaaggagagaaggtggggaggggcacaggaagactaagcactgtcttcatcattttgccatgtcccgctagtggccatgagcagccctgtccctgggtctatctcttcaggcttatgatcctatttaatcctcatgacaaccgctaaaggtagccaaggttgcccttgtttttcagatgaggagtctctagaaaagtcgtgtggcctgctaagctaactgttcagagcctgggctctggagtcacctggcggtggtttcaaacataaatccggccccctcaagagctgtgtgactttgcaaatgttccttaacctctctggccctctatttcctcctttgaaaaggagagttaaaatcttgccctctcggcatgaggttattgggaagaatcagaggtatgattgatagggtcatggcacagtggttaagagtatgaaccatgatcccagatatcttgggtttaaatcccacgtctgctatttaccagctgtgtgactttgggcagtatacttaattctcaggttttctatttctcatctataaagggaacatcattatagtacctacctcataaagttgttatgagaatcaaatacatgtcaaatccgtggtacaggggttgacaacagtaatccaagtttgctctaatttgaataaacgcagttcttcttactatactgtaaagactatatctgaccaggtgcagtggctcacgacctgtaatcccagcactttggaagtctgaggcaggtggatcacttgagcccaggagttcgagaccagcctgggcaacatggcgaaacccagtctccactaaaaacacaaaaattagccgggcgtggtggcacacacctgtagtcccagctactcaggaggctgacgcacgagtatcatttgaacccagaaggcggaggttgcagtgtgctgagatcacaccactgcactccatccagcctgggtgatggagtgagactctgtctcaaaaaaaaaaaaacaaaaaaaatactatatctggctacagtagtattcccaatgcctgccacatagttggtgatcagtaagtatttattttaaaaatgatctgggatttcaacccacatctgcataactcaaaacatttatgccagtgattctcaatgtatgatccagggctgtctgcctgaatgggcctgaccccaagaatcagagcccctggctggccagaactctggatttatcctctccagttcagcaataggctcacagtgtaacctgggccagttctccctctctaggtctcagtttccccatctgtaaaagtaagggctctctggggtgaggagctgtttatccacatgaccagccctgctccatgggggctcctggtatctcaagacacgcaaccttcaagccacaaaggatcgtcactgacgttactacttttattttgtaagcccgcatgtctcagggctcatgtgtgtgtgtctgtgcgtgtgcgtacacaggcacacattcagatctgcaggtgatgtggcttggggagaggctgccataaatattaaactcccaactccaaagtaccctgcagagattcagaactgcaggaattcataacatcattctctttcaagagtcagtgttctcaggagtgtgggcaccgtcatagaaaactatcgaaaaggagagtgaagcattagagaactgctgagcttggagggaactcggagctcatttagtcccttgttcccgaagctccaagcacaatccgtggtcagcagcatcaccctcaccagggagcttgttaaaatgcagaggctcagccccaagaggaacatgatggatcaagatttgcatctaaacaagatccctgggggacttgactgcacgtctttgtttctgaaaagctgtcctagtccccagccctcatctgcatttgggggaaacatgaggaacagagaggggtggagtttgttccaggtcccccagcccattaggagcagggccttgacaaaaaacctgtaagactttggaaaaggattcaaagctctctgcgagaggcaggcgtttgcacaaaagatgaataagtgcagaagaaatgctcagtgttgctaattgtgtccaacagggttcaggcaagaaaagagaatccaactgcattggttcttgggatttgaataaagtggctatttctagagttgggggacaagcttgaggaaaccaaccagggactgtttttcctaaggctcaagcagcaaagaaaagcatctgggtatcccagcccaaggagataataggagccaaggacaaggccttatcaggagggacacagccaactgccacacttgtgatctagagaagacagcagggaaaagtgccctgacatctgacctcctgccatgccaccctctggctgaacccaagtagagatgaggaaactgagtcacaaagtgcccaaagtcaccccgtgggggagtcaggattcaaatccaggccatctggccccagagtccataaagataaacataaggtttgtttattcctttggcaattatctactatttgctgctcagtattctagacactatggattccaaattctgggtttttcaaaatcttttcagtaacacttttgtagtgagaatattatcggtggcgagtccgcaacactcccagcccttgtcttctcagaggaaagaattcaattgagagacgcaggcaagttttaaagcagaggcaaaggtttattgaaagaagcaaagtacaactgagagatcaagtgccccgctcaacctttggctcggggcttttatacactggcttggttctggggtttcttctcctccttgattcctcccttcggtgggctgctgcgccctccctgcatgcgcaatggcctgccagcacttgggaggggccgcatgcgcagtgtgtttactaaggttgtgcgcatgctcacttggggtgattttcccttactggtccgtcgccgcaagaaaaaggtcatatacaagtcagactccaacatttgcccttctgctcgaccttaccagggaattgtggtttgctggctccagatgatgtcaactatctgttagggaactcctctccctcttggcgccattcgtggccacttatcatgtcagagggacagttttatgatcgcctgtccatcatttgatgcactgccatttctgggggccctctcctgcacaagaacacaataaacagccttgttaaaagagtccctatttcactgcaataagactgagtggtggccagagtggtagcagctgttgcttttgtggaattggatggacagcctggtaggagaaaggcccaggggttctgaccagcagtggggtcgtgctgctccctgaggcctctgctgggtcctgggccatcagcagggaccttagccagcagtgggcacctgcaggggtggaggccaggcctgggccatgtggcagctctaaggtccaaagattgctgctgtgggaaattcccacccctgcaaatgactcccagccagggacatccttaaactgctgccagaggaagagtgacatctatgtccccataagatccttatgctccagaatgtcctcccccactctcctcccctcctgggcaggctgaggtccaggaagcaaaggcccctaggcacactggggatgcacctgtgagccctttcctgctccaaagcctcccaaaggctggctccttaccctgaggcctctgctcagcttgttgcctcccaagagaaccctgccctgaccagagttttggaatggcatcctgcagacctggacttaaattcctgctgggtgactgcagcctacatcacttcaccctgccaaacctcagtttcttcatctcaagacaagactaaaatatccacctggggttgctgatgcaaggatgagaggagacgtgcagcttaaccagcacagcgcctgcacatagtaggtgctcaataaatatcagtttctttccaatttctgctgggtgctgcaaggatctcaggaaatggaagactcagccgtgcctgcaaggagccatcagactggtggtgtggggactgaggggagggacggatgaggatcccaacaaacctcagccccagtgacaggagcaacacggtacagaggagcagagaggcctggactgtggggttccctgtgcttaacgtgggacattctgatcttaacctcagtgcctgccagtgctgtttgtgacctattgggagtcaccctgttaatcccaccacattcagttggttgaggccatcatgaaaacctgcccaatttcaagggaagggggcagaaacattaccttttgatggaaggaatatcaaagaattcgtgggcatatttttaaaggaccacaattatcaaaaagcagagtggttaatgctgtggtggggaaagcgcaaagggttctgggacctcagaggggaccctttctagaatccagagaagcatgggagtggtcagggaaggcttcctgggggtgagggcaaagcagaactcacaaatgtaagcagggctggggcaaaactctaaaaattaaacacagtctgtactataaattttgttttccagaatgaaattttactatctttacttactgcgaatatatgcccgggaccatacccccaagaaaataaaaattttagaggctgggcatggtggcccaagtctataatcccagtattttggaaggccaagcgggaggcttacttgagctcaggagttcgacaccagcctgggcaacatagcaagacctcgtccctactaaaatacaaaaaattagctggacatggtggctcacacctgtagtcccagctacttagggggctgtggtgggaggatcacttgagcccaggaagttgaggttgcagcgagcgatgttcatgccactggactcctgcttgagcaacagagtagactttgtctcaaaaaatgaaaaaagaaaaaaaaattgtacgtatcaacaagcaaaaacttttttaacacttataattctacccccacaaccagagacaatgcctcatgactccttgctaaatattttccagattgttgaacatagaagcctattttgaaccccccaaaatagaaccttactctatggtgccatcggaaacggatgcctcatgacatccctttccttgccaagaaatacctttatttctgcagcctcactttaaggggcatgtcataattcatttaaccaatgcccttctggtggatacatgaggttgggtctcacttctcctgtcctgtttcccacagcatagcagtggtatcttggagcagtgatttactggcacactgactcaattatgtatttaagggcaagtccctgaaattgaattcctgggtcacagggcatgcaactgtttaaacatttgccaattgccttccagaaaatttcaccaccagcaaggtttgagaaacactgttttcccattgggggaaacatttattttttaaataaacgagccaatatattttaaaaaagagagtttggttggtgccagatgtagcttcactctcaaccctgccctctgctgggggtgagatctcaagggagctatgtggcttttttgaacctcagtttcctcatctgctaaaccaggccttcctagccgagctcttaagagactggctgagatgaggcaagatgaacagtgatgaatatggggtctttctgtggggagggtggacagggatgatcataggagtcaggcttcctcatccactgatctgggcagtgaaaactggcttctaagtatgaccttatgacttcagtgatgtcgcaagcaggttccagtccctgtgcctccccttcccgctcccaggaacccatccagcctcaggaactgcccccagccatcgagccttggctacttaagggacctgggcccaatccacagctgggacagtcctggcccactgcactgggaatctaggatgggggccttggccagagccctgccgtccatactgctggcattgctgcttacgtccaccccagaggctctgggtgccaaccccggcttggtcgccaggatcaccgacaagggactgcagtatggtaagaagccacatctgctggctggacttggcaaacccacgctccaggctgctctgggtacagtggggacagggagtggggacacagaccggaccctctccctggggcagtgccaccttctgggtcaggtggctctggctcctattctggccttactgcccaccagctgagtgccctgggcatgttatttgtggtagtgaggtcctccaccagccaacagaacacagctttgcgtgcaagtagttgatttgggaaatgattccaggaaacactgtagggaatcggtactgagatgaggaagggagggcagccaggagagagtgtgcaattaaaccagccaccacctctgatgatgggaaccactcagctgggaaaattctgcgtaaagtttggaaacacatgcctctgaactggaagtcagaattgtggtcacctctagaggcaggcagagaccctgaagggcatgagggaggtctgccggggtgctggaagttgccatatcttgatccaggtggtgatcacattcctgtataaacattaaaaattatttagcaatacctttaaaatttgtgcccgttaggtactttatgtatattattcctcaattttaaagaatgggcaggccaggcacagtggctcacgcctgtaatcccagcactttgggaggccgaggtgggtggatagcttcaggccaggagttcgaggcaagcctggccaacatggtgaagcctcgcctctcctaaaaatacaaaaattagccagtcttggtggcagccaactgtaatcccagctacttgggaggctgaggcaggagaatcgcttgaacccgggaggcagaggttgcagtgagccgagatcatgctgctgcattgcagcctgggcaacagagggagactgtctcaaaaaaataaataaaaataaaacaaagaatgagcaaaagtaggagtatttttttttaaatactgaaacaaagcctcccgactatccaggtggcatgggaactgggatatttatacaccacagtgattgattgagggcttctgggccgggggtttgtcaactccccagcacttctgtcctgttgcatgtacctgctttctgcagttccaggacaaaaagcctcgggacatacaggctcagggaggcagacattggcagctgggagtcaactgtcactcactggaaagactcaaggatatggacaggcactgaccacatgtcttctcacatccctagagcctcaattgccttacctattaaatgagataacaacattcccttagatagggttgttgggagcccagactggctcgagacaggcagagggaaatcagggaaggattccaggatatagtaaaatggaaaagacagtgggaattacccagggacaaggggtagcgttccaggcggaaggaccccaacatgtgcgtttgctagagggagaagagcaaattggaaagaggtgaaaggggaggctgctggtcatctgtgtacccatgtctgccttggggacagaaacctgggcccctcagatctcggaacagtgggacctggtaactgctacttgcattgaaactgtaaatcagggaagtttctcttttgttcctttgcactgtgcacacacaccatgtttatgtaaccagtcctctgaggttggacattttggtcctttccatattttttttttttttgaaacggagtctcactctgttgccaggctggagtgcaatggcacaatctcagctcactgcaacctccgactccctggttcaagtgattctcctgcctcagcctcccgagtagctgggattacaggcacatgctaccacgcccagctaatttttgtatttttagtagagacaggatttcactatgttggccaggatggtctcgatgatccacccgcctcggcctcccaaagtgctgggattacaggcgtgagccactgcgcccgacccctttccatatttttaataatataaaccctatttgctgttccaggcatttactgagtgcctgctgtgtgtcaggcaccaagctaggagtgcttgttatcctcacagcccccttcttgctttgcagtttcaatggcatgccaatgaggaaagtttagtttagtttagtttagtttagtttagtttagtttagttttgttttgttttgttttgtttgagacagagtctcactctgtcgcccaggctagagtgcggtagtgcgatctcggctcactgcaatctctgcctcccgggttcaagtgattctcctgcctcagcctcctgagtagctgagactacaggtgcctgccaccatgcccggctaatttttgtattttttagcagagatgaagtttcaccatattggccaggctggtctcgaactcctgacctcaggtgatctgccctcctcggcctcccaaagtgctgggattacaggcgtgagccaccacgcccagcaaatgtattgttgtcattgctatttgacagatgaacaaagtgaaggttgtttggggactttgtcaaagtcacccagctagaaagatgccctctttctctagcccccagatccttccagtttcttctacacaggccagatgtcatggagaacaagaaggaggactatccgtccaagcgcacagcacttttgcccttggggatttgttggcaaaggcattccatttcctcatcagtaaaatgggcatgaacctaacaatgccacagaaatgcagggacacctctgaatgtccctcatgctacctggcacacagaggggctcatatcctgtcattgtacttaatgctaataaggatgttggcccctctcttgaggacaggtgggagccaccgtagggtttagagcaggggaggaggcaggcagatcaagctgactcccagctatttcctttccacagcggcccaggaggggctattagctctgcagagtgagctgctcaggatcacgctgcctgacttcaccggggacttgaggatcccccacgtcggccgtgggcgctatgagttccacaggtggggctctcccttctgctgcggctctgaagtggctggagctggctgtcagggggaattggagagtgaggaagagagagcctcaggattgggctgtggggggacctctccggggcagacagtgggatagttccctgaagagctcagaaggaaattctgggaaggaattgagctcctccactcagtcacgcagcaaatattaaggaagacctactggctgtgtgatctgagccttgatttccttatctgtaaaatggagttgatctacttcctccttcagagtgctcatccaagatccaatctggccactagatatagtttggaagagaagatagaccttacactttaaatgtagtagcccaacggttagagctgaagtttgtacttgggggagtcagggaaggcttccaggagaaggtggcatttgagccaagtcttcaaaagattactagacttgagcagctgatgctttaaaagagcgtgaactgctttttgagggatgggcagtgaagaaacgacaatcagactcgtagcacattgtacccctccctgctcactgctgttgggcgtttccttcattcctgccttcttttattcagtccatcagcaaaaatctattgggcacctactatgtgcccggcaaataaaatagaacttgaccgttcttttcccactgtgacaaccttgctgacttttttggggtcttatcttaaggctgccaccatcttccctgaatctgtttcccccctacctggatgtattgagagagaggagggttagcaggaactgcaaacccaaagggatatgtctacggaccttctcaggatgccaccgggggtcattagattcatgggttctgatgcagactgcaaaaccgtgagcaattgcatcccttcctcaaggttctatttccccctttgtggaaagggagcaagaacactgctgaccccttcagtgtggcccatatggcatgaagaaagtaacgtgcttagcatggtcataagatcgatgcctggggcacagcaggtgcttacctggagcagatcctgctggtctagtccccactgtggagaggggaggcgcaaggtccctggtgaggctgggtccaggcccagggctgacacctccttccatgtctctcccttcagcctgaacatccacagctgtgagctgcttcactctgcgctgaggcctgtccctggccagggcctgagtctcagcatctccgactcctccatccgggtccagggcaggtggaaggtgcgcaagtcattcttgtaagttggctctgctcccaggccctggagctcttggccttggccttcgccccatccttcttaggtccaaggtgttcctagcttatcagaaaggccacgtgatggacagatggagtccaagcccggaggtggcctggggattgagtcctggctcttggatgagtgtctttctgtctctgagtctctacttcctcatctcccaaaggggacgggcctgcttccttgatggagtcatgggagggctaagtgcggtaatatcatgtctccttggtttgcttcccacagaagcagactttagggcaagaattccagtgcaatactttatcttggaagcgatctgaggaaacccacaggggagtggggaagtgaggaagggaagggaagggaaggaagtcagcctggtgggcaagtgaagctctgtctagctggggaactcagggacagcggagaacacgcctctgagttactccagccccacgctgtcaccccgtcctcctgcttgccattggccaagggctgcttccaggggctctggctctcaggcactttgaacagttctctgacctcagaggcacttggatggaaggggtattcatgtgctagggctgccataacaagcatagactgggtggcttaagcagaaatgtgttttctcacagttctggaggctgagggccaaggtcaaggttttggcaggcctggtttcttctgaggccactctctttggcttgcagatggctgccctttggcaatgtcctcacgtggtctttcctctgtgctcaagaaatcccatttctgaggccatgcacgttggctcacccctgtaatcccagcactttgggaggctgaggcgggaagatcacttgaggtcaggagttcaagaccagcctggccaacatggcaaaaatcagtctctactaaaaatgaaaaataaattaaaaatttaaaaattagccaggtgtggtggcaggtacctgtaatctcaactactcaggaggctagacagaagaatcgtttgaaccctggaggcagaggttgcacagagctgagatcatgccactgtactccagcctgggggacagagcgagactccatctctaaaaaaaaaaaaaaagaaaaaagaaaggaaagaaaccccgtttctctctgtatgtcctaatctctttttataaagacactagtcacattggattagggcccaccctaatggcctcatttaaatgtaatcacctcttcaaagggcctatctccaatactgtgacattctcaggtactggggatcagagcttcaacatctgaatttgggaggcaggtggtgacacagagcagcccatagcagaaggaacagcccaaatatgggtgatatgaccatatttatacttcagacctgcactgcctaaaatagaagccaccagccatgcctttactgagtacttgaaaagtgcctggtacaagttgagatctactctaagtatgcaacactggatttgaagatttaggattaaaaaacaaacaaacaaacaaaaaaacagcagctgagcacggtggctcatgcctgtaatcccagcactttgggaggctgaggcaggtggatcatttgaggtcaggagttcaagaccagcttggtcaacatggtgaaaccccatctctactaaaaatacaaaaattagctgggcgtagtggcgcatgcctgtaatctcagctacttaggaggatgagacaggagaaccgctgtagcctgggaggcggaggttgcggtgagccaagatcacgccactgcactccagtctgggcaagagagtgagaccctatctcaaaataattaattaattagttaattaaataaaataaattagccaccacacctggctaatttttaaaattatttattataaataaataaatctcattaatattttttatattgattacatgttgaaatcatactatgtattactaaaattaatttcagctctttctttttatctttttaatgtatcttctggaaaatttaaaattacatgtgtggctctcattctattgctttagaaagacggctggtttatatgttacctacatatgcacatttgttctagttccatgaaaggaactggccacactctcttaccctggcttttgtcactgaagtatcttaaatatctctttctatgggcatatgactatctacctcattttttttcacttttttgaatgtgcttttaaaaattgataggaaattcacggaacataaaattgattatttgaaagtatacattcagtggcatgtagtacattcacaattttgtgccatgtccacccctatctgactccaaaacattttcatcatcccaagagaaaattccttacccattaaacaatcattccccatttcccttcccccagctccagacaaccaccactggggttggagactcctggaatagaccacattttgccccattgttctcaaaggctgcataacattgggtgcccacagcttattcaacctgtcgctgctagcggacatgtaggctgcttccttttttttttttttttttttttttttttgctactgcctatgatgcttcagtgagctgccccacaccacgcgtatatcttggcaggaagagctacgggataaaggcttagaagttaaattactgggccaaagagtatgtatgttagaacgaggagagatctcactgatttgtgtttcagaaagcttgtgccaatgtgcactctcccagccacagtgtctgggacttctgtttactcgtacattcaatagcattgagtactaaaacttcaaaagttttttttgaatctgataggcgagaactggtgtcattgttattttcatttttaatgacttttacatgcttattttgtactgcatttcctgttcatatctttttttttcttttgagttgttctttctttccttgttaatttatattggcttgttctttgtatattagggaaataagcccatatattaaggaaattggctctttagatgtctcatactgcaattttttttttactttacatatggcattttttttgtccactgaagttttaattttctatgccgacaagtttatcaaggatttcctttatggcttatgagacttggatattgcctagaaaggccttcatccagccctgcctggaaatactggatctgggctttcttctagatcttttatggctttatttgttattcttaaatctctgctcagctccatgtatttggaggtcagaactgagccttctattttccccacaaatggtggcagacccctggtctaggaactaaccatggcttctcttacctcctccagcaaactacagggctcctttgatgtcagtgtcaagggcatcagcatttcggtcaacctcctgttgggcagcgagtcctccgggaggcccacagttactgcctccagctgcagcagtgacatcgctgacgtggaggtggacatgtcgggagacttggggtaggtctccatcggggcactgccagctggactcctggttgcagctcccggccaatccagcgctcagcctggcctccgataattgcaatgatccaggtggcttgcacaggcacttgaagatcattctctggggaaccctgttgagatgaacagacttaagccaggaatattggtgcatcattttcattaaaaaaataaactttcattcacctgacaaggggacccttgtcaggtgaatgaaatctggctatttggaggaacacagaaactttggttgaaggagagtttgcgaaaaacatacaagtccttggacaagtcatttcatctcttctagtctcagtttccttgattagaaaagtgtgaccgggtgtggtggctcacgcctgtaatcctaacaatttgagacgccaaggcagaaaatcgcttgagctcaggagttcaagaccagcctgggcaacgtggtaaaacctgtctccacaaaaaaatacaaaaattagccaggcatgatggcacatgcctgtagtctcagctacttcaggggctgagttgggaggatggcttcaggccaggcgacagaggttgcagtgagctgagattgtgccactgcactccagcctgggtgacaaggtgagatcctgtcccccacccccccgcaaaagaaaagaaaaatgtggattctcaagccgcttccccaaatctgctgaatgtgatcatgcgattgggtgccgcaggcactgggaagccagacacaccgaatcaggctggatgtgctgggacacagcagggcgccgggaaggggtggagagggctccctttgtggactggcctgaccagggaccagggcctggctttcccaggcacccggccatccccaagttcagtggcagactgtgcttctctccccaggtggctgttgaacctcttccacaaccagattgagtccaagttccagaaagtactggagagcagggtaagaaggtccaagcctctggcctcccccgagcttggcgagggctgaatggaagacctcactgaccaatggccctggaccaggccatgggggctggtttagacgtacttgggcccaaagcccagggaggacaaatcatttgcccaggtcatggagctgttgtggggcacgctggggacaaagctccaagtccgttcggttgggcagaaaatggtcaactgcttgaccaagggttaaacagcaggggctaaacagagactccagcccctccctctgctccaccttgctcagtgccccacactgccctgcattccaccaaggtccgaaaggaaaccattcctcaggcgcctgcaagagaccaggcaggaaagctcagcgagggcgtgggccaggtgggaactgggcgagctcatgagcaccagccctggatggggaggcagcaacactgtcagactggcctgttaaaaaggagtatgtgaaatcttcagagtgtatcatctttgactaaatcaaaaagatgtcgtgttaactttcagttcctctaaacactcattcatcccaaaatcccgtttctgagatattagccaaatggtatctgtagcaatgactgtgggaagggagaaagtgatggaggaggaaagggaaaaaaacacacacacaaacacacacacaccacaccccacacacactccctcccagcacacacacaccacacacacatcctacacacaagcaccccccacacacacgcacataccacaccccacacaaacacaccccacacacataccataccccacacaaacacacacaccccacacacacaccctacacacagacagcacccacacacaccacacgcaccccctacacacacaccacacacaccctacacacacaaaacacaccacccacagaccacccacaccccctacatgcacacaccacacacaccctccacacacacacaaacacaccacccactcacaccccccacaccacacacacgcgcacacacacacacacacacacacacacacacacaccctcgtctgtaggtccaacctctggtttggctttgagtgccccctcgtggttgaaacaggaacagcaggcaaaccccgcattttgggtgtggccagctgtgctctttcttttctggttctgggtccctgggattaagtgaccctgagaaatatgccaatctactcaggcaccctgttgccatattgctgtgcataacaatagtaatgtagcacaattataattatcacagtaatcacataccataattattgttttgataaatgtatataattaatgctgtacagaatatattattgtataactattctgatttataacaaaaatggctgctatttcttgagcctgtagcttggccagggataatgggctcagcagttcacgtgcacagtccctctggatctctctttttttttaattgagacagagtctcactctgtcgcccaggctggagtgcagtggcgcgaccttggctcactgcaacctccacctcccaggttcaagcaattcttctgcctcagcctcccgagtatatgagaccacaggcacgtgccaccatgcccagttaattttttgtatttttagtagagacggggtttcaccatattggccaggctggtcttgaactcctgacctcatgatctgctcacctcagtgtcccaaagtgctgagattacaggcgtaagccaccacacccagccagtcccattggatcttaacctcgaccttggaaggaggtgccattttccacatggacagaggaggctgaggggtggagtagctttcccagtgtcaccttgctggtgagaggctgaatcaggattggagcttcctagaatgtggagcagcttgtaccaaagcccttctagggctaggtgtcttgggaaagatggagatctcacctgacccctgatccttagagatcttcgaattatcttccagaaaaactaagagcctgacgcaggcctttctaattccccactcagggtgggatgtggtacctggaccagcaaggctaaggagaagaataagcactcacgaatgcttgctctctgggcgatatatactcactatctctatccccaacttcccaaaatattaccagaaaggggtcctgatccagaacctcaagagagtgttcttggatctcacgcaagaaagaatttggggtgagttcataaagtgaaagcaagtttattagagaagtaatgacggaaaagaatggctactccacaggctaagcagcaacatgggctgctcagtcgcgtatacttgtggttatttcttgagtctgtgctaaaggggtggattattcatgagttttcctggaaaggggcgaggacttcccagaactgagggttccttccccttttagaccatatagggtaacttggaaattgccatggcatttgtaaactgtcttggcactggtggtcatgtcttttagcatgccaatgtattataattaacatataatgagcagtgaggatgaccagagggcactctcatcgccatcttggttttgattggtttggccagcttctttaccgcatcctgttttatcagcagggtctttatgacctgtatcttgtgataccagtcctgctgacctcctagctcatctggtgactaagaatgcctaacctcctgggaacgcagcccagcaggtctcagcctcattttgcccctgttctagatgaagtcactctagttataacaccactgacaaaaacaccctgggaagcacttggccttgccattgtatcttgtgagtgagaaccaaaaagcagagagaggttctgcaaaggtcaaacagccattggggactgggcaggatttgaatccaaatttacctggctttcctgctgcacccctaaccactaccccagtcgcatcctcaggaggccctgctgtgtgtctgcaactcaggcatcccatgcctcccctgcccagtccttcgggtccctaaagactggggcatccaggctccaggcttttgggatggtctgatgggctactgtctgaaggaaaggcaagaaaggagcggtcttcagggagatggatggagtttcttggttcccttgcaatcaaccacgaatgttcctcaccacacttgaccttgctttctggcagctcatcgctgctaaactcctctcccagaaaatggagcagctgcaaagagaggttaagatacagccctttgccctcccagcccccagcgtcacccttccatcagcaacccagcgtctgatggatggtgcctgcttacccttcagcacagaagccatctgtgacccctgcactaggccagggctctgcatgtccctctccttcactgtacatgtggattcattgcacaagaggtggtagctggctaacaaaaagagctgtttaaagtgaggactttctcatcgcacatcaacaaagaaaatattgacgtatgaacccaaatgttttaatggtggagtttcaggcagcgtctccagtgccccctcttcgagctgtgtcagtgaaggcccacagctattctttgaaaatggtctcttgattgacattgcccttggtctttcctgcataaaacattaaactgctacaaattccatcccaggtttctttaactgcaatgagaatttaaagacatttgcaaagccatcccagtgtagaatccttcttgatctttatgattttttttcctcctaagattttctgttgtctgttccaaatttaatcttgcttttagaggggtttttttgtttttcgtttttttggttttttggttttttttgcacctcacctttccagagtatttatcttaggttttcatagaaagaacccttatagctggggccgggcatggtggctcatgcctgtaatcccagcactttgggaggccgatgggggtggaccatttgaggtcagaagttctagaccagcttagccaacatggtgagaccccagtctctactaaaattacaaaaattagcagggtgtggtggcacatgcctgtaatcccagctacttaggaagctgaggtaggagagtcacttgaacctgggaggcagaagttgcagtgagctgagattgtgccattgcactctagcctagataacagagcaagactgtgtctcaaaaaacaaacaacaacaaaaaaaaaaactcttttctcaatgatattgcattagtgtacataataaataattcgagtaattacaaaagcaagtacagcaaacaggtggtaggctttcatgtggactccagtagggcccagttggacttttcaaagtctatcccaaggctgcatcataaataattcgggtgattacagtggcaagtacagccaacaagtttggaaatgcacatttccttctcttgagaagcaggccgcacaactggtggcaattgtgtgtgagtagcctacagaccccagcattcagtcttccaggagtaccagcaggaatggggaatactgatcagtccagccaatctgttcaggatgaccattaagaactatctacaggccgaatgtggtggctcacgtctgtaatcccagcactttgggaggccaaggcaggtggatcgcctgaggtcaggagttcaagaccagcctggccaacatggtgaaaccccgtctccactaaatatataacaattagctgggcgtggtggcacatgcctgtgatcccagctacttgggaggctgaggcaggagaatcgcttgaacccaggaggcagaggttcacccaggagggtgagccgagatcgcaacactgcactccagcctggccaacagggcgagactccatctcaaaaaaaaaaaaaaacaaaaaaactatctacattaactgtatgtttatttgtgtttatttctagttagtgtctagttctgctattaaactctaaattctgagaggccaggacctcccaaaggaaaactttgtaatggtggagtttcaggcactgtctccagccagtgccccctcctcaggctgtgtcagtgactccctagctcaggtgtccagccctgggacagactgaaaagtccaactggaccctagtggagtccacatgggggcccacatagttttattgtttgtatttccttggtacctggctcatgacaagcacttataaatatttgtaaatcagtgatcactgagcacatgtgtggaataatgtgactgcagtgatcagcacggggccagaccagagctggggaactcactcagtcattctcttcccatgtttttcagatttgcgaaatgatccagaaatcagtgtcctccgatctacagccttatctccaaactctgccaggtaggacaccccatccatcccgggacacttttatttctgttaatttctataagagcatatatatatcttataaaatagtaaatggggcaaaaatatagaaagtaaaaattaagggccaggcgcagcggctcacacctgtaatctcagcagtctgggaggccgaggcgggtggatcacctgaggtcaggagttcgagaccagcctggccaacatggtgaaaccctgtctctactaaaaatacagaattagccgggcgtggtggcgcatgcctgtaatcccagctactcgggaggctgaggcaggagaattgattgaacccagaaggtggaggttgcagtgagccaagatcacgccattgcaccctaccctgggcaacaaagaccgaaactctgtctcaacagaaaaaaaaaaaaaaagaaagtaaaaattaaaagttcatttttctcccccacttttcttccaagaagtaacttctgttttgggtgtatcttttcagatattttctttgtatgtacaaatataaatacatgtaagcatataaatagacattcatgtatgtattattttgttcatgaatctatgtgtatatgtattattttaaatatatatgttcatatacatatagtataggcattgttccagatttcttttttttgagatggggtctcactctgtgtcccaggctggagtgcagtggtgtgatctcggctcactgcagcctcaaactcttgagctcaagtgatcctcctgcctcagccacctgagtagctgggactacaggtgcatgccaccacacccggctactttttgtattttttgtagagacagggtttctttatgttgcccaggctggtctcgaactcctgggctcaagtgatctgcccacctcagcctcccaaagtactgggatgacaggcacgagccactgtgccagcttgatttcatttttaaaaactttttattgaagtatatttataaagaaaagtgctcaaatcataagtgtgctgttaaagagtttttacatgcatgtaaccagctcccaaccgagaaacagaacacggctggtttttcagagcccctggtgtccccctcggtcactgcccagccctccagggtcaccaccatcccaacttctaccagcaaagattagttttgcactttgcacatgaatggaatcagacaatattttgagtctcttttcaaaagccagaaggctttctttgttcaactttaaaatatgaggtcagggctgggcgcggtggctcacgcctttattttttgttttctttttttttttttttttttttgtgagacggagtctcgctctgttgcccaggctggagtgcagtggcgcaatctcggctcactgcaagcttcgcctcgcgatttcacgccattctcctgtctcagcctcgcgagtagctgggactacaggcgcccgccaccacgtctggctaattttttttgtatttttagtagagacggggtttcaccatgttagccaggatggtcttgatctcctgacctcgtgatccgcccgctcggcctcccaaagtgctgggattgcaggcgtgagagctcacgcctgtaatcccaacatttagggaggccgaggcgggtggattacctgaggtcaggagttcgagaccagcccagtcaacatggtgaaaccccgtctctactaaaaatacaaaaattagccaggtgccgtggtggatgcctgtaatcccagctactcgggaggctgaggcaggagaatcacttgaacctgggaggcggagtttgcggtgagttgagattgtgctactgcactccagcctgggcaacagaacaagactctgtctcaacaaagaaaaaaaataataaataataaataaacaaaataaaatatgaggtcaggtcaggcttggtggtgcacacctataatcccagcactttgggaggccaaggagggagtatcacttcagttcaggagttcaaggccagcccgggcaacatagcgaaaccccatctctacaataaatacaaaaattagccaggcatagtggtgtgtgcctgtagtcccagctacttgggaggccaaggtgggaggatcgcttgagcccaggaggtcaaggcagcggtgggctgaaattgtgccactgcactccagcctgggccacagagtgagatcctatctcaaaaagaaatgaaataaaataaaacatgaggtccatgcatattgttgcatgcacctgtagtgtagctggtttattctccttgctgcatagtatatcaccatgtagatgtttccccatttatttgttcattctactgttgaaggccatctggggggtgttcagttttaggccattatccgtagtgctgctataaatgtcctagtacctatggtcgcatgtctttgggtatatatctgggagtgaaattgcaagctcgtcatatcatgtgatatgcccagattcagcattataagatcctgccaaacagttttccaaagtggttgtaacagaccttatttgttaacagccgtgtagtgttccatcacatggatgtgtcttcatttatttaataagtcccccactgatggacatttaggtgctttgctgtcccttgctattgccaacagggctgcaaggagccatctacaagtggagtctctggatccagggtgcacacattaagctcggagggggagaccctggcaaattatctgagatgttctctgatgccttagctcctaagcccctatgcggttatttgctgacatcacctttaccagaggtccaggtcggcaacccggtactgggacttggaacattcatccattcagggttttggaggggagtgtctgggccctctggacatgccatgcctgaccttcctggttattggctcagcattaagctccaggtgtggctggagaggtgaagcctggactcatggtgtgtgtgtatgtgtgtgtgtgtgtgtgcttgtctggaaactgcttaggccctaggctgagcatacacccccaccattgttaactcatccaagggaatccatgtagtgtctttcttgaagaagcaattctttgcctcagggccgggctagtagggggattctgaagaaagtcacagggaatgtgagtcagccagagcccttgcccctcctccagcagctgaaagtgtcatctggcccctaattctgccctgtcctcattcacagttacaacagagattgacagtttcgccgacattgattatagcttagtggaagcccctcgggcaacagcccagatgctggaggtgatgtttaaggtgagggtcctggggccgggctgcgtgggtgaggctttccctcagggtcagccattctttgggccacctgtccccccaacttcagatctgtcctcatcctcccagtggttcccgctttgtcaagggccgggtgatatggagtggtggggagtgtttccagagctaggattctcccacggctgtcttacacctctcaggtcttaacgcttccctcctccttcttcccctactttgccttgcccatcatgcagaaaaggccaatcagagcgggtcttagggagtgtagatgggcctagggcatatagaggggctggccaggacttcctgtgggttaatgtagcaaagcttctggtgagcttttcattaaaagacataacactgcctttaatggtggagtttcaggcagtgttccagccagcgtcccttcatcggactgtgtaggggaatacctagcccctgccccacgataggctttgaaaagtccaattggaccctatttccctctccagggtgaaatctttcatcgtaaccaccgttctccagttaccctccttgctgcagtcatgagccttcctgaggaacacaacaaaatggtctactttgccatctcggattatgtcttcaacacggccagcctggtttatcatgaggaaggatatctgaacttctccatcacagatgacatggtgaggatggtggcaaacaggtctctcaaatgaacacataacctaccgctccttccttctttccttttcacccctgttgacatcagtcaaatagtgagttatagctaagagaaaaatcaacaccaagaaaaatatgttagcacaatctccctttttactttggcaaccaagaaactcaaagccaaagttctttctcccatggctgggtgtggtggctcacgcctgtaatctcagcactttgggagcctgaggcgggcggatcacttgaggtcaggagcttgagaccagcctggccaacatggcaaaaacctgtctccactaaaaatacaaaaattagccaggtgtggtggtgtgcgcctgtaatcccagctacttgggaggctgaggtgggagaatcgcttgaacccaggaggtggaggttgcagtgagccaagatcatgccactgcactccagtctgagcaacagagtgagaccctgtctcaaaaaaaaaaaaaaaaaaagctcttcctcccttataacaactgtggaagactttgcagcttacttatctgtgttttgcttttctagacctgtttactagtctagacttgttagtctaattcatattttctctcatcctgatgatttctggaggtttattaaaaaatattttagtgaatgaggccgggcaaggtggctcatgcctgtaatcctcgcactttgggaagccaaggtgggcggatcacctgaggtcacgagttcaagaccagcctggtcaacatggcaaaacctcatctctactaaaaatacaaaaattagctgggcatggtggcacatgcctgtagttccagctacatgggaggctgaggcaggagaattgcttgagcccaggaggcagaggttgcagtgagctgtgatctcactacttcactgcagcctgggcaacagagtgagactgcatctcaaaaaaaaaaaaaaaaaaaaaatatatatatatatatatatatatatatttatatgtgaatgaggcaagataatacatgcactgataaatgcatatattttcagagaaaaggaaataaagaccaagtgaaaataaagcacaattataaagacactgagcccttaaattaatttctttaacatctcaaacctgtcggggagcttccttgtagctaaagtgaaaaagatacatgatttcatgattcatggtgaaaaggagagacagtcttcctcacacccccaaaacaactgtttccaatgtggctttgtataagggagactgaattttacagtggatctcacctttaatggttctccagtttatctaatatttctgggtttcaaaaagttgtttcttgaagcacttcataaaagttgaggcctcatgaataatgtcaggatggtgggagaaacagtgtggttcggctcagacggtccagcttaccctggtataagtcaggggccgtctggtagatcgagggtcattttgtccttctgatggcctcctacacctgcacaggccttcgcttctggcatcgtgtttggtttacccatcctactgcggcacgggcctctctttcaatgggatgataatagctacgttttatggagcactcaccatgtgctgggccttgtgctaggatgttcgtttaggcctcacagtgactcgaaggtggggactattgttatccccattttatggataaggaagttgaggttcagggagatggaagggctggcctgagatcacaaagtcaggacacaaaccgaagtctgtgtgaccgcaaacctcaccctcgcagaccctctgagtgggagccacacatcagctgccccccggggagagcgggcaggatgctgaagtcccatgtgctctccttgggtgaatgcaggacaggcatctcctccctgccagggtaacccaggctgtggagaagcgacagtcttgcacatccccctgtctccccaatcttctttagaccttcagctccagcgggagcaccctaaaacttcttcatgtctctttgctgcagataccgcctgactctaatatccgactgaccaccaagtccttccgacccttcgtcccacgggtaaggagtcccttagttccccatgagtgcagaccgagcctactagactccagaggtttctctttaaaacctctgcatctctcagcttgaccaagagtgagaaggccgggatgagactcccactgaaggctggggtgctgctcctttcaaagcctaaataacagaggccacgccccatatcttgtgggaccacagcttgtccaatcttttattggtgttatctaagaatcccaaggaatgctggcatagtccataaaatgtaccctaatgaacagcagctaacaattacagggggcttcctaggtgccaggcatgttcttggttctttaaaaaattattttttggccaggcatggtggctcatgcctgtaatcccagcattgtgggtggccaaggtgggtggattgcttgagtccaggagttcaagaccagcctgggcaacatgacgaaaccccatctctacaaaaaatacaaaaattagccaagcgtagcggcacatagctgtagtcccagccactggggaggctgaggtgggaagatcacctgaggctgcgaggttgaggctgcagtgagctgtgattgcaccactgcactccagcctgggcaacagagtgagaccctgtctcaaaaaaaattattaaaaatgttagtttttgaatgggaaataaattctcaaggttcaacattcaaaagatctagaaggttatagagtggaaagtctcacatccactcctattccctaaccacccagttcccatctcaagtttgccaatattaccagattttacatatctttctgatgatattctatgtatatacaggttcactatctcttatctgaaatgcttggaaaagcaactctgcctaccttcttagtgaagcattttaccccctcagccttccaaatgtctcccttctagaagaggatgtaggttttacatatacataaccaaaaggttcatgggagtgctgtttttccacgaatagcctcctaaaaaggaagagtcttgccccaaattaaactctgtacctatctctagtacacagaaaattaagagcacttttgaaatggtggaatctagggctggtcgtggtggctcacacctataatcctagcactctgggaggccaaagtgggggggtagcttgaggccaggagttcaagaccaacctggacaacatagcaaaaccctgtctctattttagaaagaaaagttaaaaaagaaagaaagaaagaaagaaatgttctgtggaatatcatattaaaagagtaatacgagaaaattaaatattttttttaaaaaagaaatggtgggatccagctgtgtcatatttcgaaaacactggcatctgacctcagcatgcccaattagcagaatgtgatgaggggatggagaaaccttgggagaggtagggagggagaaaaaatgggcccaacttttctggaggacaatttggcaatacctgccgaaagttttaaaagcattgctggccaggtgcggtggctcacacccgtaatcccagcactttgggaggctgaggcgggcagatcacctgaggtcaggagttcaagaccagcctggccaacatggtgaaaccccatctctactaaaaatacaaaattagccgggtgtggtggtgcacacctgtaatcccagctacttgggaggctgcagaaggagaatcgcttgaaccccagaggcagaggttgcagtgagctgagatggcaccattgcactccagcctgggtgacaagagcaaaactccatctcaaaaaacaaaacaaaaaaagaaagcattgctgtccttcaacccagcaactccacctctaggaatgttttcctgaaaagaatagccaagggtgctcacaggaggtggtcattataatggcaaaaccctggagacaacttgatgcccaatagagtttaatccatcgcaggacccatacataacgaaatacaacacagccgtgaaatagatggtgcagactctgtgtctgacatggagagatggccagttttgccactaggagaaaaaggcacagagaattttgttggaaataaaatcaatcgaaagcaacttccagctttatctgactccctcaggcctctcctggcagacttgtatattttcttctcttgatgtaatctcctaattctgctcccagttagccaggctctaccccaacatgaacctggaactccagggatcagtgccctctgctccgctcctgaacttcagccctgggaatctgtctgtggacccctatatggagatagatgcctttgtgctcctgcccagctccagcaaggagcctgtcttccggctcagtgtggtaaggttcagagcctttgcaaatgctgtttccttttccccacatgcttttcccttttccccacatgcttttctccccactcaccacctgggtaattcctccaggtctcaacttaaatattacttcccgagagagggctttcttgctggcccttacccccaatctaccttacgccccttgccactttttcttgtaacaccccattatctttcttctcagcgtttactacaaagatactttgtagctgtctgcaggtgtatttgtttaatgcatgtatctctcactatgtgagtctgggctattgtggggagaaaggtatactggtgtttgtctatttgtctattttgaccttggaagactacatttcccaagcttctttgcactttgatttccacccaggtcaaccaatgggaggtactgtcaggagaatgatggcggggaggaaggatgaagccagagtactatttcctctttctttaccacggcagaggctctggctgtgactatgtctcctcatggtgacttccataattccacctccactctttgttcctctagtcctggggtggatacagcctcctgtctctggataatctctgggtggcctcaccaactctttactagcttctcaacaattccatcacttgtataaccaattccccgtattaaattccctctgcgttaaacattgagagtcagttttccttttttgatggactctgtctaatagggaagggatgttgggtcctttgggggccttgctccctggatggagaactctgctctcttgtttcttgacttttgaaatcaacaagtcaaatctctaccagggtaattcttcctagaggctatatctgcaatttaatattgttgttattgttatcaaaagtgtcattattaatatattttaaattaaaatataatttactgtctgggtgtggtggctcacatctgtaatctcagcactttgggaggtcaaggcaggagaatcacacaaggccaggagtttgagagcagcctgggcaacacagcaagactccattgctacaaaaaagaaaaaacaaatagccaggcctggtggcatgcacctgtagtcctatctactcagggggttgatgtgggaggatcgcttgagcccaggagattgaggctgcagtgagccatgattgcaccactgcactccagctgggcgacagacagagactccatctctaaaacaataataataatttattaatgttgttactagggctgaatcttgacctgagataactagaaatgatcctttttagagctttccaagggtaggtactctataccttctcttagtagtctgttcaaagtttaactgctaacataaacaacaatttcaagtaaaaatgttcaagtccaagttcaaatattgtttgagcacctacagtgagccttctgggagtctatgatctagtgggcaaatttcctgctttagctcattgagctgtttgttgagaggagacagttggtccctcgtcatcatccttcctatacatacaaccttcatcacttacacctgcttccttcttctggcatttccaggccactaatgtgtccgccaccttgaccttcaataccagcaagatcactgggttcctgaagccaggaaagtaagttggcctcctacctacatgggggtgcccagctggactccatctgtatgctgtagctgcttctctgtagctggtgggagggggggccaccatttggaaaggacacttacatttcaccccaattggcccaattcttctgccccactggtcctgcccccacaaatctcaaattgttaaagaattcactaagactgttacttcttaatgtatgaattttagaagccagctatatgaacttcctgaaatgataaagagtgagctttttgacactatctcatctgccctgtgacagtcttcccgatgtcattgtatcactgcttttagttcctcagtcatcttttccactcctgctcccgccctacctttggccctgtgccttctcaagcccatcctttctcgcttctggggacccccgcattgcttaaacttgcataaagcccacaccttttaatcttctctgattcattacagggtaaaagtggaactgaaagaatccaaagttggactattcaatgtaagttgtttttattgatgacatgattagaatgttaattaatttggggtgtttcctaagcaattgctatggcacctataataggaaatacaaaaggagaagagttgattttttgccctgcagaagtgtaaaaggtctcgaaaacacaagacatagggccaaggaacagttatatcctagtataaaacaatatataattaagtcatctactgaacagaattctcttaactgcaagagacagaaagccaattgaaatcatcttaagcaaagaggagaaatatataggattatataattgaaaagcaaaaataaacgaaaaaactaagaccagaggtttcaggcatagctggatccaggtgttctaattagtgcatcaagaatctctctccatctctctgttctgttttcatttgtgttagcttcactctcaggcaggctcttccaattggtagcaagccccagagtttcctacagtttcagttttttaaaaaatttgcacacacacacacaaaatctctgtgctagctctcattggactaatcttaggcacccagtcttaagccaagcactgtggccagaagtcagcccagcatggatctcatctacactccaggaggcaggatttgcagtcagctacatccaaagcacatggaccaagactggcaaggagggttgttccctgggggaaaatagactccgttatcaaaacaagagggattgagtgctgagcaggtaaatccaagaagtgatttccacaaggtagaaaaagtggtgaagtagacggccccaaataaaaggaggaaagagaacgtgaaaatcagtgtgggccaaagttatggagaagagctttctggaaagagggaaggaggagctgggtagactttaatgtgtagtcgttggcttctcttttaccattccatgatgctggcctccactgaccacctccacctgtgccctgcctcccagactttcccgaagcacttatgaagtggaaacaaacacagaggcggtggggagagatgcagggaccctgaagctaactcctttcagagaataaagggtggagtgaataatggtgcactcatattgtatctgtgcgtgtttactgcaaagtaaaacattcaagtgagaagtttcacaaaaatccatcctgtcgggttttcagagcatgaaatgtaaaaacaaaaactacagactcagatacatttagattcgaatcctgatgctgctgcccagtttgtagtaagtccctttcattctgtaggcctcagtttcccgatatatggaatagggacattaatatgaactttgaggggttgttgtgaagattgaatcagacatgcacgtaaagctctgagctctctgcttggcatatagtgggggttagaagttgtgtttcatgattttggtagagaagcttattttgtttttattaaattttttaaattatgtaggtagttcaggaaaaacattctcactgtaaataaaaccgatactaaagataaggctaaggacatgtcaaatgttgatgttcttcctttagaggaaagactgtcgggtgtgtaactttccaaaatttttctattcacttgcataccaaatgttcatctcaaaagagttttatcttataaaatagtagcatgatgtaatactagtttgcttttcccaagcgttttgctatgttggcacacacagaaccaccatgtggccctgtggcgatgtaaatatatctctcctgttctcttccaggcagagctgttggaagcgctcctcaactattacatccttaacaccttctaccccaagttcaatggtaagaatcactgtggatttttccaagtcaaaagtgaacactgctgtctggaggaaagagagttggacttggaaaacagggctctcctgggggctgtatgaccgtgggcaagtcacttctctctgagcttagtgacctgcctgtgacatgggatcgttgaagttggcctcatctccctccagggctctaatgagggttgggggctgggacagctctttggagcacgggaaacctccttataagcgggacagagggacacatggaagtgccccacatcctgaagaggcaggtcaaagactgaggaccaagttaatatagaaggcacaaggcagccgcctctgaactcacatctcccagtcaattgcccaactgcctagtcaaaaaagaaagcaaaaaacttaaatcctgtttccatgaagctttgcttcttttggctgcaacagagaacaggacgggcaaagggcagggagtggaacgccctgttctttatcttatcatgaatgtgtgcttcctccagacagcaccatgcctgatagcttaggctcccaagtcagcctccctgggtttaaatcccctttctgacacttcctgtgtgacctagaacaagttacttggccactctgtgcctcagtttccttatctgtaaaatggaaagaataatcacacctacctcatagtcttggaaatcactaaatgggaatatactgaatatagagtttgcagagaacattttcggtaaaaatctgtctctaattattatttattcaccaatctctttcaatgttgtgcttcaacctctagataagttggccgaaggcttcccccttcctctgctgaagcgtgttcagctctacgaccttgggctgcagatccataaggtcggtgggttcaggggggctctgaggatgtgtgagggaggaggtggtttgcatgctagctttggggccatgattcatgggtgacacccagcccagccctgcagctgggaaagtctggccaggggcaggacgggtgctcctgggccttgccatatgccacaaagccatccacatgtccttcagaagtggcacctctgctggtgcaggtggcatttgacacagccctatgccaccaccacatcccatccctaccatgaggggcctgagggaagctcaagaccagctcgttttgaaaatactgcgggccgggtgcagtggctcacgcctgtaatcccagcactttgggaggctggggcgggcagatcacgaggtcaggagtttgagaccagcctggccaacatggtgaaaccccatctctattaaaaatacaaaaattagctggacatggtggcaggtgcctgtaatcccagctactcaggaggctgaggcaggagaattgcttgaatccaggaggtgaaggttgcagtgagccgagatcacgccactgcactccagcctgggcaacagagcaacactccgtcaaaaaaaaaaaaaagaaagaaaaaaaaaagaaagaaaatactgtaagtcctagacgtagcattaggtcaggttctgaaagtcatttgtaagttttaagcttttcttctaaattttaaggttgaagagctttattataaatacctgtttggcatgcctccccatttaaacaagtactacaaccatatatactttttttttttttttttgagacagagcctggctctgtcacccaggctggagtgcagtggtgcgatcttggcttactgcaacctctgcctcccaggttcaagagattcttgagcctgagcctctggagtggctggaactacaggctcccgccaccactcccagctaattttttttttttttttttgtatttttggtagagacaaggtttcacaatgctggccaggctggtctcaaactcctggcctcaagtgatatgctcacctcagcctcccaaagtgctgggattacaggcatgagacaccatatacagccaacactatatatgtttacaaaaattattcataaacctattgctccactacaagcacagtttgaattttggtgtacttctagtgctttttgttttaagggtttttttttttaagtttgtttgttttgcacagttgcattactagtgctcatacctgttttctttctttccctttttttttaaaacttaaaacaaatttttttttaggccaggagcggtggttcatgcctgtaaccccagcactttgggaggccaaggcgggcagatcatgaggtcaaaagtttgagaccagcctggccaacatggtgaaaccccatctctactaaaaatacaaaaattagctgggcatggtggtgcgcacctgtaatcccagctacttaggaggctgaggcaggagaatggcttgaacacgggaggcagaggttgcagtgagctgagatcatgccactgcactccagcctgggcgacagagcaagactccatctcaaaagaaaaaaaaaattaacttaaggttctttttaaagcttaacttaaaaactattttaatatcaagtgaaatagtgaaaaactattttcattattcaaactattattctgaccaagcattttgtggtctatctgtgcttccaattttcaggttatcttttgaggtgagatgaactgggttggcggactcattagcaggagggggatgctgcgctgtgcctggtacattgttaacaacagaaaataatagccattaaagggaatgaagggcaggggggatgattagggacctagaaacactggccaactgttctatctaaaaaacaaatgtcgaaagcccttttgggctctgagatactcagcacttaactgctcttgagcatttataagtagtcagacagatcgttgttcaaagcaaagattgagtgacagttcataccatcggcctcagttttctcctctgtaaaacgggacataaccgaaatgtcagtgggcttttgtgatgatttagagggcaagtatgatagcttctagctcaatgtttgacatgtggaaagtaattagatttattatatattataatattcattagaattttgaggtcaactctgcccatgtgtctaaccgtctaaaacaaaggatggatcactgtgggaaagaactgaacttggccttcggttcagaattcctgcccctctgggtgatggaaacgtaagaagagcaggagagtacaccctagcagttcacaatttttcattatttgccaaagagagaaaatttaggtgacgcaaaggacacttagaggcctgccgggcagcagcagctcggggaatgacagatcgatctctaccttggagaaggtagctgggaagagctgtgctttacggagagcttggggactgaggcacactcgcaatttatgcactgacctggattctggcagagcttgtgtttcgtgagacgtgggctccctttcaatcgcagatgcatctttttggagtagaggatgctctttaccatcctgtcctgtcctgtttttcctaggacttcctgttcttgggtgccaatgtccaatacatgagagtttgaggacaagaaagatgaagcttggaggtcacagctggatctgcttgttgcatttccagctgtgcagcacgtctcagagattcttgaagaatgaagacatttctgctctcagctccgggggtgaggtgtgcctggcctctgcctccaccctcctcctcttcaccaggtgcatgcatgccctctctgagtctggactttgcttcccctccaggagggaccaccctccccgactggcctgggatatctttacaagcaggcactgtatttttttattcgccatctgatccccatgcctagcagagtgctggcacttagtaggtcctcaataaatatttattaaatgatgagatgatggaatcacctggtattctagctgagcctcatcactgcctgccctcttctgacctcaggggtctttggatagtcagccacatctatggtctccaaggcccctttctcatcgccgctgctatgggagcctcaatgagagaaccagggattctgtacatcatgtagccctggatctggcgctggtgctccgtctctaaggcccttgtcctgtctcaggcaggggctcacttcgacatcgctccctccctcatttcttgcctgctacagccaagggagccaatgatctcccggagcaaaaactcagcctcccgctgcttttccctcattgaagcaggtgtaaattaggaggaaatggatctgtctaagtttttggtccaaccccaataaaaagctcatccaactgttgtttatgagccccaagcctggagggagaggccgtgatttctaattactgaacaatgagcctttgatcagactaataaagagtcatttccaagttatgtagttgggctcccagggactgggagtcagaagactcgtttgataattttttttattgtgttaatgagcagatggatggagcttcaggctagcagataattcacagggaataatcccatttaccctgtgtgtgacagagatgtgttccaagatgggacgatgtgttgtcgcccagctggtggcagggtaagctgtggcttcaagccctctctcctctccatttttgttcatttgtttgccaccatccatccctatgaccgactggcaaaggacacaggcttcatccagtactagccatgtggccttgggaaggtcactttccccctggggtcctcatctatgaaatgatgatgatgattatagtagtcaattcctgggactgctataatgactgcattgggtaatctatgtggaaggatttatttagccaaatggggattccatatttattggctgggtgtgcttactaagcacctcctatttgccaggctttggggtcctcatggggagaaatacatggagcatgggctccattcctgatcctgcttttaagagtgatacttcctctccctctccctctccctctccctctccctctccctctccctctccccacggtctccctctccctctccctctccctctccccacggtctccctctccctctcccctctttccacggtctccctctgatgccgagccgaagctggactgtactgctgccatctcggctcactgcaacctccctgcctgattctcctgcctcagcctgccgagtgcctgcaattgcaggcgcgcgccgccacgcctgcgtggttttcgtattttttttggtggagacggggtttcgctgtgttggccgggctggtctccagctcctaaccgcgagtgatccgccagcctcggcctcccgaggtgccgggattgcagacggagtctggttcactcagcgctcaatggtgcccaggctggagtgcagtggcgtgatctcggctcgctacaacctacacctcccagccgcctgccttggccccccaaagtgccgagattgcagcctctgcccggccgccaccccgtctgggaagtgaggagcgtctctgcctagccgcccatcgtctgggatgtgaggagcccctctgcctggctgcccagtctggaaaatgaggagcgtctctgcccggccaccatcccatctaggaagtgaggagcgtctctgcccggccgcccatcgtctgagatgtggggagcgcctctgccccgccgccccgtctgggatgtgaggagtgcctctacccggccgccccgtctgagaagtgaggagaccctccgcctggcaaccgccccgtctgagaagtgaggagcccctccacccggcagccaccccgtctgggaagtgaggagcgtctccgccaggcagccaccccgtccaggagggaggtgggggggtcagccccccgcccggccagccgccccgtccgggagggaggtgggggggtcagccccccgcccggccagccgccccgtccgggagggaggtgggggtcagccccctgcccggccagccgccccgtcggggaggtgaggggcgcctttgcctggccgcccctactgggaagtgaggagcccctctgcccggccagccaccccgtccgggagggaggtgggggtgtcagcccccccccggccagccgccctgtccgggaggtgaggggcgcctctgcccggccgcccctactgggaagtgaggagcccctctgcccggccagccgccccgtccgggagggaggtgggggggtcagcccccagcccggccagtcgccccgtcggggaggtgaggggcgcctctgcccggctgcccctactgggaagtgaggagcccctctgcccagccgccaccccgtctgggaggtgtgcccagcagctcattgagaacgggccatgatgacaatggcggttttgtggaatagaaaggggggaaagttgggggaaaagattgagaggttggatggttgccgtgtctgtgtagaaagacgtagacatgggagacttctcattttgttctgtactaagaaaaattattctgccttgggatcctgttgatctgtgaccttacccccaaccctgtgctctctgaaacatgtgctgtgtccacccagggttaaatggattaagggcggtgcaagatgtgctttgttaaacagatgcttgaaggcagcatgctcgttaaaagtcatcaccactccctaatctcaagtaccccgggacacaaacactgcggaaggccgcagggtcctctgcctaggaaaaccagagacctttgttcacttgtttatctgctgaccttccctccactattgtcctatgaccctgccaaatccccctctgcgagaaacacccaagaatgatcaataaaaataaataaataaataaaaagagtgataggtgtgctgaaaagagccagtattgattccagcctacctgttttgggtccctgggcaaggtatctccaagcctcagtgtcctctcctgtcaaatgaggctgggaagagctcttggcgggattattttggaaattgatgggttcaggttaagcttccgtgggtgcccagagaataaccaggtggtggtcaatggatgacacaattagatcacctgtcatacttggtgtccccagaagcagaccctgaagaaaagaggtgagtacaagtatgacggtgttgcaaaagtaattgtggtttttgctgttactttctttttttttttttttgaggtagagtctagctctgtcgctcaggctggagtgcagtggtgcaatctcagctcactgcaagctccgcctcccgggttcacgccattctcctgactcagcctcctgagtagctgggactacaggtgcctgccaccacgcccagctaattttttgcatttttagtaaaggcagggtttcaccatgttagccaggttggtcttgatctcctgacctcatgatctgcctgcctcagcctcccaaagtgctgggattacaggcgtgagccaccgcgcctggcctgactcccagtcttttctccagttaatctttcctgggtttttgatgagattcctaggaagggggtcttaagataattgcatttcttttggaaagaagttttcttattcagagaaggaaattccagacagagtcccttctggtgcttcaggaaagaggatcagagagctaaggaggtgagggaagatcagagggagaccttgagtctgcttttttagttcagcatatcaatgtgccatatattggcgtattgttttccgagccccaacagtgttatatctcgatggggtagtacaggacaacacagctggccctagagtcccatagcaggttctgacgccctgaaatctgactgtaaacatatgagtatcctggacagctccaacctgtagagaaggactggccttgggacaggaggttctgatctcaataaccggaagaactggactgtcaaagaaccttcaagagaccacagactcattgctgtgtagatctcattctcacacaaaaccaagatgccaccttggagcgcctcctcttgactacaacctgttcctcccttctgcccttctctgatttcccctctcctctcctcaacctgatcaagacctctagcctcaccggtgtcttccaggccgctattctgatttaatttgtctccataactaagcacagttcatcatctctaacagaatcctttcatctcctgacaatcctactttccacatccccagcctggggcctaggcgtaggtaagagaattaaattactggaggaaaaggcaggcaggctatagccagttgaggtctccttccatcaccaaaaccatagttctgtctgaatggcctgagcagcagcaacagcctagaaattggaatacatgatatttctaatgaggctctcaggtaaggtctcagaacccattcagtctcaagacatgctttttgtttttgtttttgtttctttgagacaaggtctggctctatctcccaggctggagtgcagtggcacaatctcggcaaacgacaaccttcacctcccggactcaagccatcctcccacctcagcctccagcatagtgggactacaggcatgcaccaccatgcccagctatttttgtgtgtgtgggtatttgttgtagagatggggttctgccatgttgcccaggcaggccctgaacttgtgagctcaggtgatccgccggcctcagcctcccaaagtgctgagattacaggcaggagccaccatgcccagctgcatttcttctttctttttatttattttttttgagatggagtttctctcttgttgcccaagctggagtgcaatggcatgatctcggctcactgcaacctcggcctcccaggttgaagtgattctccagcctcagccgcctgagtagctggaattacaggcgcccgccaccatgcccagataatttttgtatttttagtagagacttggttttatcatgttggccaggctggtctcaaactcctgacctcaggtgatctacctgccttggtctcccaaagtgttgggattacaggtgtgagccaccatgcctagcctgcatttctttctaagagcccaagatgtagcttagaagaaaagacactagcatgccaggatagtccatattgtgctgtaagtgaaggcagcatggagaagtcttggcaatataggtaacaaggtcaggggcagccacaggtctgaataggtggaaagatgagagctgctgggtatagtatcaaagggttaggcaaacaatagaaccaataagtgtgcgtgtttggaaaggacagaagaagaaaacaaaataaacaaaaccaaaaccaagtacagcattgggccccagggattagaaagtcaagcaggagctagcacggccaatgcactttgcttctttcactggaaaagtccaaaatatattttcctattagtacacagagatcttctgcatttgatttttaaaatttaacacagctacataatattccacatttgtgtatgtacaaaacaacttcttcattcttatttaaagatgcataggatctcctggtgaaagatacaatttatttaaccagttcctacttatgggtcatcaggttgttttaaaacttttgcttttataaataatgtttcagtgaatacctgtattcatatgccaattcatacgtgtggaggtacattgtagaataaatgcccagaaatcaaatcctataactctgactctttggttaatttagcagattgtcatttgctcactttctcttctttccagactttccccttctcttgaggtggtgcctgggtatacagggatgttgaaggggtccacatggcatcatgagagtggagtgaagcaggacatagtaaagaatttaaccttgctcaaagagagacatggcttttgtccttggcccctggaaggtaatctctaagcccttggaatgcttgcctggtaagagtgcctttgtttacctgggggcattggtccataacagatagtctaacaaggggagccacggcagggcttttgttcacatcatatcagcttaatctctgaagatgctgaagactgagcccagccacatgggcagccaaccagattggcatgatcaaggccccaaaagactctggagcttttcagatgattttcaggagaaatgactgagcccaaagaacaatagcctggaaggaagttcctatgagtgctgtgggaagtggtgggaaggtgaggggcggaacttcacaatgcacaaaggttgtcttattatgcagatgaagtctccccggtaatctctgagctgcactcagaggatagatgaagaagtctgggcgtggcgattactccaagtcttttctctggttaatctttcctagctatttgatgagattcctaggaaggggaccttaaaataattgcttttattttggaaagaaggtttggctgagtgtccccagttggcaatacttcatgtgtattgtcacacatcaatgctagaaaagtgatgctgtccacgaccccagggagagagggcagctggaagctctgcgttagaactttcttggactctgccctatgttgctcttcccttggctgattttaattggtatctttttgctgtaataaaatataaccatgagtataacaactttaagtgagttctgtgaatctttctggcacattttcacacttaagggttgtctgggccactcctgaacttgcaattggtgtcagaagtaagagtggtcttgtgagcaatgctgcctctaacttcacacaaggagtcttctcctcctcagctccttcactcactggacatcctgctggccacagatgctgcctgagcatgaggccagtgacacagagacctgttccctgtggcctggtcaaggcctaaagtccctcacctcctgcccccagctgctgcatcttcagatctgctacaaaccctgtattgatcaggcttcctacctgcaaactttagcatccactctgggtagtataggcagaaaggggtttgttaaaggacattagattgttctcaaatggttgggaggagaaacagagttgaggctgagcttccaaactggtcacaggggttaatcagatgcagaccacaccaggacatataagctcactttctcattagccccactgattttttaaggtattctatcatacaccaggatcaacatatacttataaaattcctttgtctttactatttaagattgcaacacttatttagtgttcaattatctgcttgtgaaatacttcttagcccagtgcttctcaaacttcaatgtgcctatgaatcccctgagcatcttattaaaatgcagattctgatgcagcaggtctggggaggagctgagaatctaaccatcttccaggtatttccaatgctgctggtccttgagtaacaagatcaagtaaactttgtgggagtaagaaatttctcactgctatataaccccctagaacagcacctggcacatagtaggtgcacagttagacatttgtcacatgaatggatttggcccatagatccaacatggtccagcttcgccctccatccagcactgtgtgaattgttggtctacagaacgttcagtggtctggagcccaggagagaaaactggaaatttctcaaaagccaagtagtgacagaaaatgattcagtcgctgatatggtttggctgtgtacccacccaaatctcattttgaattgtagttcccataatccccaagtattgggggagagacccagtgggaagtaattgaatcatggggtggctacccccacgctgttcttgcaatagtgagtgagttctcatgagatttgatggttttttgtttgtctgtttgttttttttagatggagtcttgctttgtcacccagcctggagtccagtggcacaatcttggctcactgcaacctccgcctcccaggctcaagtgattctcctgccttggcctcccgagtagctgggattacaggcacctgccaccatgcccagctaactgtttgtatttttagtagagacagggtttcaccatgttggtcaggctggtcttgaactcctgacctcaagtgatccacccggctcagcctcccaaagtgctgggatgacaggcgtgagccactgcacccagctgagatctgatggttgtataaggggcttttccccttctgctcagcacttctccttactgctgccctgtgaaaaaggtaactttctcctcctccttctgctatgattctaagtttcctgaggtcttcccagccatgcagaactgtgagtcaattaaacctatttccattataaattacccagtcttcggtgtgtctgcatagcagtgtgaaaacagacgaatacagtcaccttgttgaggtcaagtggccaatttttgcaacattgctagatcagggtctcagtgaaaaacccccttttaggaagaaggcacaaatttcccatatagaaaaattctaagtaatgtatgtaaacactgccctgcaagaagttgggagcacagctctctgccccttaagtatgggctacacttagtaacttgcttccaaagaatagagtatggaagagtggtggggagtaaatttatcgagaaacctgacaaatactacattagccaggtgatcaaggtaaagatactcagtgataagtcatgttgatagtaggcatcttagttcaggctactctaacaaattaccatagactgagggacttaaaccacaaacctttgttctcaagttttagaggctggaagtctgggatcgggatgccagcatggccagcgagggccctccactgtgtggcaggctgctgacttcccactgtctcttcacgtggtggggagcaaagagagggaagcaagctctctcatatcttgtcttctgatggcactgtttaatccaggttagcgtaaagctgccttattttgaagttcagcctaaagattcctctgtacatcgtgaactataacctaaatggagttgtaaacagaccataccctactcttgtgccaatcaccgagttttggccaatcaaaagtggccaactgtttaaaccgttcaaataaggcaaacatagagctgtaaccaatctagctgtttctgtacctcacttccgttttctgtacctcacttccgttttctgtacatcacctaactttttctgtccataaatcttttaccaccacgtgctatgctggactttcttgagcctgctctggttcaggaagctgccaattcgtgaattgttcttgttccagtaaactcttttaaatttaatttagcttaagtttttctttaggctggatgcggtggctaacgcctgtaatcctagcactttggaaggccaaggcgggcagatcacttgaggtcaggagttggagaccagcctggccaacatggcaaatcctggtctctactaaaatacaaaagttagtcgggcgtggtggcgtgcatctgtaatcccagctactcaggaggctaaggcaggagaatcgcttgaacccaggaggcagaagttgcagtgagaatgagaagagatcgtgccattgcactccagcttgggcgacagagtgagactccatctcaaaaaaataataaattaaaaataaataaataaaataaaataaagtttttattttaacagtgctaattctattcatgagggctccattttcatgacctaattacctcccagaggccctacctccagatattatcctattgaggatttagatatcaacatatgaatttgagcaggaaacaaatattcagtccataacagtaggtgtctctgacatggtgagatgagaatggcactcaatggtcttcctccccaaaacccgtggtgaaaaacatcagacaaacccaaattcaatggcattctacagaaactgttggtcagttctcctcaaaactgtcgaggtcatcaaaaacaagggcagtgtgagaaactggcacagcccaggggagcctcaggagacttgaggactacattcagtgtggcatcctgggtgggaccctggaaaatgaaaaggacattagggaaaaaaataataaaatttggataaagttatatggttaataagaatatgtcaatcattagttataataaatgtaatattaatataagaagccaacagtagaggaactggggacaggatatatgagaattctctttatgacctttacaaatttaaaattatttaaaaaaaaattttataaagaaattgaaaattattttttatttatttactgagacaaggtcttgctctgtcacccaggctggagtacaatagtgtgatcacagttcactgcagcttccactgcccaggctcaagcaatcctcccacctcagcctcccgagtagctaggaccacaggtgcttgccacatgcccagctagtttttgagttctttgtagagactgggtttcaccatgttgctcaggctggtctcaaacccctgggctcaagcaatccacatgccttagcttcccaaagtgctaggagccactgcacctggtccgctttagtattttaaatctaaaactattaaatcctttactgtaaatctaaaactattccaaaataaaaagctcatttaaatctttttttaggctgggcatggtggctcacgcctgtaatcccagcaccttgggaggccaaggtgggtggatcacctgaggtcaggagttagataccagcctggccaacatggtgaaacattgtctctactaaaaaaatacaaaaattagccaggtgtcgtggtgggtgcctgtaatcccagctttgtgggaggctgaggcaggagaattgcttgaacccaggaggcagaggttgcagtgagccaaggtcacaccactgcactccagcctgggtgacagagagagattccgtctcaaaaaaaaaaaaaaaagtttcttttaaacttagaaaaagtttttcatccattggcagaatgtagacgatcagaagtcaccaattatctgcagaggaaatcttgggccagaaagaaaggtcatcagctcagtcctccccagtagatggcaatagcagttaatttgttggtggctactttgaacttgggagccaacagaatctacataatagggtttcaaacacctttcagaaccgatcttgtatcgcagatgcaggaagagagtttaggttttcctctttagtgtgtcttctttaggaatgaaatcttcattgacacattagtgggtgactggtatttaatgagaggcatcagaatgctgtgattgaagaatttaaattccccatcagggccaggagcagtggctcacacctataatcccagcactttggaggccgaggcagaaggattgcttgagcccaggagttcaacaccagtctgagcaacacagcaaaaccctgactcttaaaaaaaaaaaaaaaaaaaggccccatcagggaaacacatccccagctcagactcctcacacaataaaaataacaccagggctggtccccacactcctccagcaatgctcccaaaggctgctgcctgtcttctaatggacttcgctctgctcctgaacgcagggctctgtgaaggtccctcaggctcagtcctgggccctcttctctttttctgccctctggctgtttttaaaaagatgttctcacattcctaggggatgtccgcctccaaaactttgaagactatccccaattatcctgtttccagtccagccttctcttctgagatgctggcctgtcccctaactgcaggcttgatgtccccttcagactaactggatttagggagctgcacccagttggtgtgccaggggaaaggtagaggcatcctggggatttctcctggagtctggtgcgtaaattcccccacagcgcatccagctgggcctgcatctcccagcccgcagaggaacgctggtagtaaaacacagcagaacagatggctgctttatgggccagaagaaaacgatttcccacttgaggccactaaagaatccagggctcaattctctactttcccttagagaaggctttcctcccatctcaagtgatctcatggggccattagtacagacggagcggagaaatcccagggccaggtgggctgtttttaaaataatgttctcaccatcccaccttggaacggagggttcggcccagagctatcacctgcatcctccagatcccatcaagcccggctttcagtcccacccttccaccccacagctagctttctaggacctgcagttcaatcaaaagtagctctcaccccggaggtggaggttgcagtgcaccgagatcacaccattgcattccagcctgagcgacagagcaagactccatctcaaaaaaaaaaaaagtagttctctaagaactgcccctgcgcactgccacattaagagtcaatatcaaatggctgaaatgaaaaacacagataaaatcaaagtgttggcaagaacatggaataaatggaaagcgtgtgccccgttggtgggagtgtatcctcattagtttgggctgctataacaaattaccatagactaggtggcttaaacaaccaacatttatttctgatagatctagaggctgggaagctcaagatcaaggtgctggcagatcgggtgtctggtaaagaacatcttcctgatttgcagatgaccatcttctcatggtatctttacatgtcagagagcagagagaaaggaagcaagttctcttgtatctcttcttataagggtactaatcccatcacgagggccccatcctcatgacctcattaccttccaaaggacacatctccaaataccatcacatagggagttagggtttccacatatgaattttggctacagtctcagctactctggaggccaaggcaggaggatcatttgagcccaagtgttcaagtccaaccttggcaacatagtgagatcttatctcttaaaaaaaaaaaccactgcataatattccactggatgactatttcccagtttgttcaactatcccccattgatagacatccagttcttcaccactataaacatatgaattgaaacataaacacttagtccacagaatatttgtaatttgcatagtagagtgcaaagtggtacaaccattggaggactgtttggcaggatgtatccgctaaagttgaacatgcatgatgagccccatgacccaggaactccacttttcagtatgtactcaacagaaatgcctacatctatttaaaaaaagatgcatacaggtatgtccataaagcagttttcgtaatagcccccaggtggaaataacccaaacattcagcaacagtagatggataaatggtggcacattcacacaatggaatattaaacagcaatgagcatgaatgaactacaaccacatgccaccacatgggtgacccctgcaaacaggatgctaagtgaaagatgcctggcatgatttcattgatacaaaattcaaaagaaggcaaacctaacgtatagaagcaaaagttagacaagtggtcagacttcaaggtggggtgggggatagtaactagaaaaggatatgaggaagcttctggggttttggtgatgttctgcttcttgatccacgtactggttacattggtgagctcactttgagaacatctgtctctccatatacttgtctgtgtatatgttatacttcaaaataaaagtatctatctgaagggtatgtctgtatttatgagactccttatagtgtctttgctcacgataaacaaagcaccatttttcagatttttttcatccatatatatgaagatatacattgtgtacagctgcttattatggcattgcttgtaatagcaaaataataacaaaacaaaaatgaaagaaacctgtatggtccttaataggatactggtagttatattatggtatatagccatgcaaaggaatactatgcagccattaaaaagaatgaaagaatgaggcccatctatgtgtgcagacatagaagaatgtgaagaattattaggtggaaatagtagactgcagaacagtaggtacagtattatcttctttcatgcatgcatgcttatatgtgtacaggaaattgctaagaggttacctaagatagtgaaacagaagttacctctggagaatggaaatgaagcattggtaaggctgcaaaatttttactttcctttttgtgccattgtacattatttgtatatttttaagcaagcaaatactactccttaaaagtaaattatctggccaaatgcagtggctcacacctagcattttgggaggccaggatgggatgattgcttgaggccaggagtttgagaccatcctgggtggcatagggggaccccgtctctacaaaaaaataaaataaaatttaatttaatttaatttaatttaaaaatgaatttttaaatgtattaatttcctattgctgctgtaacaaattagccacaaactgcgtaactttaaacaacatgaacttattatcttttagttttggaggtcaagagggctgcattccttcaggaagctctgggggagaatctgttcccttctttgttcagctgctagaggctgcttacattcgttggcctgcagccacttcccccatcttcaaaaccagcagcagagcatcttctctcctctctgacctctacttctggccttacatcttctttaactctgatccttctgtttttctctcataaggacccttgtgattgcactgagcccacccaaataatgcacgataatctccccatctcaaaatccttaacttaatcacacctgcaaagtccgttcaccacgcgaggtaacatactcataggttcagggaattaggacatggacatctttggtgagcccattgttcaacctgccacaaatgtatatcaaagcaattaaggcacacattttaaaaaatcaaatgtgcaaaagggcttatcataagaagcagtggtctcagaggtaccacatttaattcctgaaatgtttctggttttagttcctttgatggctagctcaagatctcaaataacgttcctacatcattttttaaatttaccaattttctaaaaatttgctgagtacatgaggacttagcttgtcaccccattttcctttcctctctcaaaatactatgtaacataatattttttgtttctctattggtgtgtttgtaattttagataatacattcacacatatttcgtgctctatcaactatacctatatgacttccctttactcactgtgtgaccttggtgggtctctctgagcccaagtttccacatctaaaaaagtcacaaatgtgcagtagtctcactagctggctgtccaccgaaccatttctctttccacctggacacatggttgaactacatttcccagcaccccttgcaattaattgtggcccatgtgactgagttctgacaaatccataaacaccacctgtatgatcccccactacatctttctctctctctgtctctgtctctgtctctctctctctctctctctctctcaatctctctctctctcgtcccccctcagccagctggatgtcgatatattgacacccaaggtgacttgggataaatgtgttgaagatggcagagcctccagcagcagtctaggtccctgaatgattgtatggagcagagcttctcccatccccaactgtggcatgtgggctttgcaaaagcagaaataaacctgtcagtcactgagatttggggatttaaacattaaacacgagctagtgttggttttaattggtacagaaagtatagcaacccatgagactactgaattacttaaacgtatgtaagtatattaaggtttgtaagttgcttaatcagtaaatgcttaacaaatggaaactattattattagtaacacattccttggacgtcagggttctcccctgcttcccctcccagagactttctagtttgccctgttcagttaactcttcctttccctcagcaagaaaatacgtgcctatctaacaccataaataatcaaataatctctccttgttcagaactcagctccacaattcaattggcaaccgatcatgtggtattttcaactgctatttaaatattttgctatctaatttctcctagttttatgtctaacctccctaagtagattataattgccttgagggcaggaaacagatattacatgtctttgtatcacccacggctcaatgcagtactgagtcaggcacttaatacgtatctggtgatttgatttgaagtctcttgtcacttaacctagtgatccaatcttttcccaagttatgggctgccctaggcttttatcatatagctccttcaatttatagccagctgttaattatctccagatcttgccactgcgcttctgtgcatgctcagctgtccccacctttcactttaatttctcctgttcagatcccagagccgcccgcaaaggatatctcaccctgttctcactgatgatggttctaagctgcccactggggctttgaaaggtacttggaaggtaaatgagccacagaatgttaacccaggagggcggaaacccagggcagcaggaagtaagagaggaccttgagggtctccattttgcagggtgctcaagggccaaagggaagggaggccctggcaggttgaggtgacctttacactttaacactttggtgagtttccttaacaccttcccatttctgaagagcctggacgtggttgaggtcttgcagagaacgagtagagagtgcggtggtttcaactgaaatagtccctgtcaatctaacagtccaatatttgtagttacttctcactatggattcagttgtggtacccccaaaaaagatatgctgaccaggtggggtggctcatacctgtaatcccagcactttgggaggccaaggcaagtggatcacttgaggtcagaagtttgagaccagcctagtcaacatagtgaaaccccgtctcttctaaaaatataaaaattagccaggcgtggtggcgggcatctgtagtcccagctactcaagaggctgaggcacgagaatcgcttaaacctgggaggcggaggttgcagtgagccgagatcacaccactgcactccagcctgggcgacagagcaagactccatctcaataaataaataatcaaaaaagatatgctgaagctttaacctccaggacctcaaaatgtgatcttatttggaataggctcttgatagaggtaatcaaattaaaatgaaatcatcaggatgggctctaatccaatatgacttgtgtccttataaaaagggaaaatttggacacagatgcagctacacgcagaggggaggtgatgtgaagacaactatgtgatgctggaggcagagattggactgatgcagctgccattccagggatgcatgaggctgctggaagctaggaagatgcaaggaaggattccacccagagtctcaaagggagcatggcctgtgggcaccttgacttctgacttctagccttcaggactgggagacaatccatttttgttgttttaagtaacccagtttgtggggacggggaggtggttaagaaagggtctcactctgtcatctagcaggctggagtgcagtggtgcaatcacggctcactgcaacctcaacctcctggattgaagtatcctccaatctcagcctcctgagtagctgggactacaggcatgtgccaccacacccagctaattttttggtgttttgtagagatagcatcttcctatgttgcccaggctagtctcgaactcctgagctcaagctatcctcctacctcggcctcccaaagtgctgggattacaggcatgagctactgtgcctggtctagcttgtggtattttttatggcagcccaagaaaacgaatacacttactttcccttatccatgcttcccttcccatatccataaaggggcacctaaagtcaacctctcaagagtgggagggtttttagctgaaataaagatttaagttagccatgcaaaagtcagcttctcactgagtttccaaaataactgcagctgttccaactattcttctgagaggaaaacctttagaaatgttccctgggagatgggctcccaggttgccaagcccttttctggagggaatgttccagactcagctcccttgggactttccctgctgtctgtacgagtctcagacgtgctgaagcagagaatcagatggtagtggctgctgatgtttggtgcccaatggtctggataaattctttttgtttccattagaacattcagtttccccaatctatgtgctcttgggaggtggagagagaaaatccactcattccacaaatatttattgagccagcactgtatgccaagtgctgtcattgtgcttgggatttatcagtaaacaaaacagatccagaaaattcccacctttataaacattacattctaggatgggaagagacaggcaataataaatgagaacaaaagttaattagatagtaggttaagagatgataatggttatgggagaaaatagaacagagttataatccaatctttatccattttgttactcaaattatcccagctttagtcgttagaaatgacttcaggatggcccctacatcctttggctatgtccctgtatttgcctgttttcatactgctataaagaactgcccaagactgggtaatttataaaggaaagaggtttaattgactcacagtttggcatggctggggaagcctcaggaaacttacaattatggtagaaggcaaggaggaagcaaggcacctcctcccaaggcggcaggaaggagaagtgctgcgcaaagggggaagagccccttataaaaccatcagatcttgtgagaactcactcactatcatgaaaacagcatgggggaactgctcccatgattcaattacctccacctggtctttcccttgacacatggggattatggggattacaattcaagatgagatttgaatgggaacacaaaggctaaccatactaggccccattattttctgagcacttcctcactctagcacaacagtatgtgtgccaggttcatcttttacttcccctgctaaagacttgcaatctccaaggaactctagttccttttattgaaaaatggtatttggaaaccaagatttgggtgctagatgtctagatgtgctcactgctactgggatgccattgcctctagggcttctgagaggacaaaactagaaactttacataggacaattactaacaagcatacacataaagccatatttatttctatatttatgcatctgtataattgttcaaaaccatgggttcatactgatatttctgattctcatccaacaccacacaggattcattctagctccttccttatttctaactttttttccaacagtgagaaccctggctctaattatccataatctgctttcctttttgttcaatccaaatagacacatattgactaaacagagcacaatatttgtatgcaattctttttatctttgaccttacaatatacagtaaaaatgctgtcttccagagttgcttagttcttttattccccacatccttcagtgggattatctcagtcatttgtaacacaggttcatttgctatagcttatatgccatttggggtttctcccacatatcctggttggttttgatgatttatttgtttactgggcatgtgaaacattactatggttctgacagtcaaggctatacaaaaaggtgtactcgccagcatttggcattacatttttttttttattttagccatcctaataggagaataatggtatctcattgtggctttaatctacattatcctaagagctaatgatgttgagcatctttggtgagttacctaatcaagtcttttacagattttctcattggattatttattatcttaaggttgagtctaaagaggttatgtgtgtatgtgtacatatacatatatatatattctagatacaagtcttttgtcagatacattaattggcacgttttctcccagtttgtggcctgccatttcattctcttaacaaggctgttcacagattacaagtttttaattttgatgaagtccaacttattatttttctttcatggcttgtgcttttggtgtaatatctaagaaatctttaccaagacctaggttttcttttgtgttttcttctaaaagttttatagttttgcattttatatttagatctatgattcattttgagttaatttttgcatacagtgtacagtttgggtgaaggtttattttttggcctgtggatgtccaattatgccaccaatattttgggggagcactattctttctccatggagttgcttttgaaactttttcaagaatcagttgcccatacttgcctggatctatttctggactctctactctgttccctgggtctgtgagtctgttcctccaataccactgtcttcattgctgttgttattacacagtaagtcttaaaaacaggtagtgtgatttctccaactttattcttcatttccaaaattcttttaacatttctagctcttttccctttaagagtacactttagaatcagctcatctatatttacaaaaactcctgctggaactttgatcggaattatattaaacatataaataaatttggagaggactgtcatctttgctgtgttgagtcatccaatctgtgaatgcaggttgtctctccttttatctgggtctttgatttcatagcacttcatagttttcagcacacagatgctgtacatgttttgttaaatttatacctaagtactgcaccttttggagctgttataaatggcactgcattattaatttcagtttgcaattgttcattgctaatttacagaaatatgactgatttttccatgtcaacctctcactgtctgactataatttgttattctcttactatactactggattccatttattaatcttttatagaaaagttttgtttcaatattcatagatgaaattagcctgtgaatttctttctgctatcttgtcaggtttggatatttgtagcttcataaaaataactaggcagtttatcttgtttctctctatgctctggaactttgatgagctttggaattaccttactgaaagaaactatgaagtcctcttggatgacttcctcaactaattccatagttatcaatctgttcaggttttctgtttcttcttgagtcagtttttggtaatttgtattatttaagcttacttcggttttaaatcaagttacatttcaaggagactaacattgaattgtgttaaatatgtttttataatttttttctcccttttatctttatactgtataatatcatgcaacagttaaaaagaaaaagtgaatctatatatgctgacacggaaagatccacaagacataatttttaaaagcacgtttcagaaaaacagagaatcaattttttaacagaaaatcttattttgaaattagaactctgattttcatatacaaaattgacgtaaaggggtctgaaaagatacccacgaataactacttgatagcagtatcatctttagactgaagccagaaggatccctgccttgggctttgattttggaggaacccactcaagttccctccagatgcaccgtatcccacagggaatatgccagagggacatgcccgtctacagccaccaccctcctcccagaacaggcctcatgtgcctggaaccctagaattcctttccagggcctgtgaggggctcacctcattatgtcctcttgggaatggagtgcaccactgtcgtgaccactgctaggcccaaccggtaactaatgggtggctgtttgaggagggtgtggaggaatttgaatgtgcaggttggagtctccatacacatgtgcataaggaggccatcatggtgtagacagagctgggcgtgggaaggaaagggaggccttattgccacatcctggcaaggaactggggaaaagtccagacagtctaaatccaaatctggctctccagctcattatgaaggtatatttgtccagataggaggatagaacatttttattcaactatttgttagctgggttttcagaaactatctagacatatataggaattacattaaacctacccaccctcagtttgactgccccaccaatgtcacaagcacgtcttctttatcacgttacttctggggagaggttgggacttgagggcaaacaggagaaaaggggtgttatgggttgaattatgtacccccaaattcatatgtcaaatccctaaatcccagtacctctgaatgtgattgtatttggagttgtggcctttaaaggggtgattaagttaaaatgaggctgctagggtgggtcctaatgcaatctcagttcactgcaacctctgcctccctggttcaagtgattcttgtgcctcagcctcctgagcagttggtattacaagcatgcaccaccacacctagctaatttttgtatttttagtagagacgaggtttccccatgttgaccaggctggtcttgaactcctgacttcaaacgatccacctgcctcagcctcccaacatgctgggattactggcatgagccaccgtgcttggacatgatgtccttataagaacaggaaatctgggcacacacagagatgtcagggcacttgtgtacagaggtacaaccctgtgaagaggctgcaagagagtggccatccacaagccaaggagagaggcctcagaaaaaaacccagtctctatcatagacttcaagtctctagaactctgagagtataaatttctcttgtttaagccacccagtgtggtattttgttagggcagtcctagcaaactaatacagaggacttcagctttttgctttattatttcttatttgacttttgtttcttaggcacatatatccatgcattattaatgtaattaagaaataacatttgtaggagtaggtatgaaaacgaaatacatgttaaaatgttctcctcatgcttatttttctattctcatttctaattgtgccttctacgcctgtgtgtgtgtgtgtgtgtgtgtgtgtgtcttgattaggctagatagtggcctatctgttccactatgtggtttttttccactatgggtcagctcttcaattgatcaattctacttttattttgttttctgattcattaacttctgcatgccttcattctgttcttcttttcttagatttattttattgctcattttgtatctttctcggttgaatgcttgattcatttatctttttctttttcttttcagaaatacatgtttaactgatgaatttttcccaggactttttcctcccccttcaaaccctggttccttggacagatttggcaacagctttgtaagtgatattagaaatagttggctgggcgtggtggctcatgcctgtaatcccagcactttgggagaccagtgcaggtagatcgcttgagctcaggggttcgataccagcctggccaacatagcgaaacactgtctctacaaaaaatataaaaattatttcccgagcatagtggcaagcacctgtagtcccagctacttgggaggctgaggcggggggatgtcttaagcccaggaggcagaggttacagtgagccataattgcaccactgcactcagcctgggtgataagagtgagatgctgtttcaatcaattaatagaaataattgtctatgataattaaaaacaggatttttatttatttatttatttttcattttccctttaggcgtatttaatattttccccccaggccgatcattctcaatgtacgaacatgtgtgcacatgttactaagacaattaccatgttaatgaaatattcaatttgaaaaagaaaaggaaattaagtgtttaatactgaattttcctttcaatatgattttagctctatctcatcacttgacacatattgttttcctttttttcctcaatctggctcgaaatggcaatttcgacttactcttgttctcaaatggagttgaagagggggttttaaatttttcatgtggttgggtttttgtctcatttctacttttgttttaatttctggttttattgcttggtggtcagaggcctctactatttctattatagggaaagctactaatattttctttataaccatagtgtatttgtccattttcacactgctataaagaaatagccgagactgggtaatttataaaggaaagaggtttcattgactcacagttctgcatggctggggaggccttaggaaacatacaatcatggcagaaggcgaaggggaagcaagcttggaccttctcacatggtggcaggagagagaagagtgaggagtgaggggggaagaatcccttataaaaccatcagatcttgtgagaactcactatcatgagaacagcatggggaaaaccgccctcatgatccaatcacctcccaccagctctctccctagacagatggggattatggggattacaattcaagatgagatttgggtggggacacaaaacctaaccatttccacagtcaaattttatcaatgctttcatgggtgtttcaatagaaggtgtattttctcttttttttttttttttttttttggagatggagtctcactgtcacccaggttgaagtgtagtggtgtgatctcggctcaccacaatctccacctcctgggttcaagcaattctcctgcctcagcctcctgagtagttgggattacaggcgtgtgccaccacatccagctaatttttgtatttttagtagagatggggtttcaccatgttggccaggctgggctcgaactcctgacctcaagtgatccacccacctaggcctcccaaagtgctgggattacaggcatgagccaccacacccaacccagaggtatattttctgattgcgggatacacaatgcaatattatctcttacatcaatctgatgagttatttgattcagatcctccgtattactgtgtgacctgtggcttatgctaaaactttgggccaccctttatccaatgtggttcagtccatttacctctgctcagccggccttgtgcaaaggtgacgtcagtgtgtggtcccatctctcctctctctaccttaccctcaggctgttggtttgggttagcagcctagctcagacaacataagggctgcaagatcactggatcctcttgacagcccaggttcccgccatgctggggcttgaagacaagctcagggagtgaccttctctgattctccaagcccacctctgccctaagttatcatatttctggtaaaggtgtgggccagacccttcaggactctgccacttacttttcaggatcctgtgtccactgagatctgggggataagtaggggcagttgagatcttccttaagtttttctcaagtatctatctctgagtctgcaaaggtacgcttgccaatttgctcagatctgccacattcattatagatggcatgctcttccataatttgctctgctattttgttgttgttgttgttgctgctgctgctacctgcaacaaaacagggtggggtggggtctcactctgccatcttttgctcctcatatttatctctgccaattgcttctgactgttgccacagtctacgaaagctgacagctggattctcaccaaattgagagactgtgtgttgaatcgtctgattcaaaataaatgccattcattctgtgtatagctggagcacctcaaaggtcactgaaactggagttcagcaggaggcctgtgtgcctgctggtgacgacagactaggcatgcgtgttaagatgcggtggagaaagaacacggtggcttcacatcataagtcagaagaatagagatgctcccaattgtgtctcacacgggcgattctgcatggcctccaagtgagcagcagccaggctttactggcttaatgatgttctttttcacttcctctgcaacatcagggagtttatggagttgtatatatatacagtgttctcactggtcatggcagctcatgcctgtagtcccagcactttgggaggctgaggtggtggatcacttgagcccagaagtccaggaacagcctgggcaacacagtgagaacccatctctacaaaataattttaaaattttttaacttaaaaaatttaaaaattaaacatagtattttcaaaatttccttgtttttcctttaatgttttacgtttcactttctcctttccattttgttctttttattctgtctccggatcgtgtaacaaatttgtaagcaccagtatttctaatgtccaggaggtacttttatgattccactttcccttgaacaagaccttattagctctttcattataatatatatatatattttttgagatggagtctcactctgtcgcccatgctggggtgcagtggcgtgatctcggctcactgcaagctccacctcctgggttcatgccattctcctgcctcagccttccaagtagccgggactacaggcgcccgccaccacgccaggctaattttttgtatttttagtagagacggggtttcaccgtgttagccaggatggtgttggtctcctgacctcgtgatccgcccacctcggcctcccaaaatgctgggattacaggcgtgagccactgcgtccagcctttcattttaattcttacctcctcctcacagtctgtcttttacaaaaacatctatttttaaaaattatttactattataaaaaaagcctagagggcttaaatttatctgatacttgaccatgcagaaagttgacttttgatatgggtacaagtcagattgcaccctaccccagtttttctagttaattccaaagtccctttacaaaggagaaacttgaggctaggtgtttgttaattgtcttcccttcacctccttatctatagaagttggtattagcccagaggactcttttgtttattttaactggcaattacaatgtgaaaaccttccatatgtgtatcagtcaggtttcaccaggttatgctgcaggacaaacaaccccaagatcttagcaccttcccaccaccatggcctatttctcactcacattatacatcagctgtagctctgccccatgccctcttcattctgggatccaggctacaggagcagctgttacctggaacattgacattatcctggcagagggaaaagagaaatggcagaaccatcttattgctcttaaagtttctgttcaggagcaccaggccacttccactcatctttcagtggctaaagtaaatcccatggctgcacctaatgtcaacgtcatgggaaatagaatccgccagcaagggtgatttgtagggaaagcccagtaggaaggactgatatggagtggctgcaaatgttttgaacaaataatgcagtctaccagaagaacaaataagcaatctactatctctgcattaaccttgcacttatttcattgtcccttgcacgtgtgtttttattatgaaatattacagacatacagaaaagtgcataaaacatcactatatactacaatgaatatgaatcaaagggctggtccatattgagttgaacacatcttttctttttcttctttttccttttttttgagatggagtctcactctgtcactcaggctggagtgcagtggtgcgatctcagctcactgcaacctctgcctcccgggttcaggcgattctcctgcctcagcctcccgagtagctgggattacaggcacacgccaccacaaccagctaattttcgtatttttagtagagaatgggttttgccacgttggccaggctggtctcgaactcttgacctccagtgatctgcccgcctcggcctcccaaagtgctgggattaccagcatgagccaccatgcctggccgaacacacctttttatgtacagagggtagaacttattttctgcaaagtgccagaggatcattacaatgattcaagaggtttgtgagtccaaatgatacttattgtctagagaatctcagctgtccttctgaccccagagccttgactctgtgtatcggagttgcagatgagcttcctgatgaatgtgatgggctggcagctacacaacctggccatggatcacctcctcccagcatgcaccagtgaaaagtaatgcctgttcatttcacatgcaccatttccctccagctgctcctctggatttgagcttggcctgtgtcttcccaggacaataacatgaaggaattcacaaacataatgttgacagaggccagacacaaaagaccacatgctatacgatgccatttatgtaacattcaaaaataggcaaaactaatctgtgtcattaaaagtcagttagcagtttcctttgtaggagtgctgactgaatgggagattgagggggtgcttccagggtgcaagtaatgttatttcttgatctgggtggttacatgtttgtgtccaccttgtgaaaattctttgagctgtacaacatatgatttgtgcatttttgtatatgtgttagatactaaacttttaaaaaatatattgggtaaaaagtgctcagaaatgctgcttttataatcattacttacctgtcatctaagaaagtcaatgtgtgtaaattatgaaaagtgatttctggctgggcgtggtggctcacatctgtaatcccagtgctttgtgtggctgaggtgggaggatggtttgagcccaggagtttgaggctgcagtgagctatgattgcgccactgcactccagcctaggcaacagagaccacagcaaaaaaattaaaaaaaaaaattatcataatttctgtttattggctgaagtgatctcatgacaatcatacccagttgagcctttgcactaaacataattatatcagttgggaattaaattcaactgcagggaaccaaaaaacaaacaaacaaaaaaacaaataaaagcatatcagtcaagacagaggttgtttttcttaataaggaatttgaagaaaggcagtccagagctaacagggcagcaccacggacatcaggtacccagtctccttctagcttttttctccaccatcctgagaatgtgaccttcttcctcatcctcccaagggggatgctgtgctccagtcatcatgaccacgttccaggaggaaagaaagagaagatcaaagagcaaaatggacaagttagacaagtctaatcccttttaaagagtttttccaggagcccacctcttcctgattcagatgtggtcgctcagcagcctcctaccatgcaggcagctactccaggacccagttcctgcagtgcacggcagccagcagcaccacaaggccagcagcttcccgcagtgtccccacctttggcgattttgtagcagagtgcctctagtgagacaccactctgtgaatggctttctctcactccgtagaggacagtttcctggcaagttccagaggacagatttctagcagattctaccaacaaacactgcagtggcttctctgccatccagggaaccacagctgtgccctctgcaacaaagtctggatctcagccttgcgagaatgggggaagggagttggggggaattttatcttaaccctaagaatggtggctgctctttatttttgtattttatttttgagacaggggctctctctgtcacccaggctggaatgcagtggcacagtcttggctcactgcaacctctgcctgctgggctcaagccatcctcccaccttagtctcccacgtagctgggactacaggcacataccatgcccagctaattttattttttgtagaaatggggtcttgctcggggtttcgctgtgttggccgggctggtctccagctcctaaccgcgagtgatctgccagcctcggcctcccgaggtgtcgggattgcagacggagtctcgctcactcagtgctcaatgttgcccaggctggagtgcagtggcgtgatctcggctcgctacaacctccacctcccagccgcctgccttggcctcccaaagtgccgagattgcagcctctgcccggccgccaccctgtctgggaattgaggagcgtctctgcctggccgcccattgtctgggatgtgaggagcccctctgccctgccgcccagtctgggaagtgaggagcgcctcttcctggccgccataccgtctaggaagtgaggagcgtctctgcccggccacccatcgtctgagatgtgggaagcgcctctgcccggcagctgccccgtctgggaggtgaggagcgtctctgccccgccgccccgtctgagaagtgaagagcccctccacccagcagccgccctgtctgtgaagtgaggagtccctccgcccggcagccgccccgtctgggaattgaggagcgtctccgcccagcagccgccctgtccgggaggtggggggcagccccgcccccccggccagccgccccatcctggagggaggtggggggcagcccccccccgccagccgccccatcggggaggtggggggcagcccccgtccggccgccgccccgtctggatggtagggggcgcctctgcctggctgccccgtctgggaagtgaggagccccactgcccggcagccaccccgtctgggaggtgtacccaacagctcattgagaacgggccatgataacaatggcagttttgtcgaatagaaaaggggaaaacgtggggaaaaaatagagaaatcagatcgttgctgtgtctgtgtagagggaagtagacgtaggagactccattttgttctgtactaagaaaaattcttctgccttgggatgttgttaatgtataaccttacccacaaccctgtgctctctgaaacatgtgctgtgtcaactcagggttaaatggattaagggcagtgcaagatgtgctttgttaaacagatgcttgaaggcagcatgctccttaagagtcatcaccactccctaatcgcaagttcccagggacacaaacactgcggaaggccgcagggtcctctgcctaggaaaaccagagacccttgttcacttgtttatctgctgaccttccctccactattgtcctatgaccctgccaaatccccctctccgagaaacacccaagaatgatcaataaatactaaaaaaaaaaaaaaagaaatggggtcttcctatgttgcccaggctggtctggaactcctgggctcaagtgatcctcctgcttcagctcctaaagtgctgcgattacaggcatgagccactgtgactggcctattactattttaacagttcttggtttgctcttcagaaaactgggaggggttttctcttcaccttgcagagtgaatcatctctggcttaggaaccccaaagtgaattctaactcctgtgaggtcctggggcatccagaaaagtcactatgaagtgataggaggatagcggtgggaaaggcccggttccaaggagcaaacaggaggtaccaagtgttcctggtagatgtgagcttgaattcaccaaagcccagctgtttctccagaaaggaaactccgttgaaagtgcagtctgcagcgccatcttttggccacgcctgggaatgtcacagctggaaggaacactgtagacaactggtcacctagtatgctggtgaaccctgcaagttcttaggcacactctcagaggtacgactcagcaggtttggaggattcacatgtttatcaagtccctcagggtgtatgttctcatgtaagtcgttcagtaattccttaccttccccccatctggaaaccccatttaaagttgtcaacaggccaggcgcagtggctcatgcctgtaaatcctagcatttgggaggccaaggtggtcaggagttcaagatcagcctggccaacatggtgaaaccccgtctctactaaaaacacaaaaattagccgggcgtggtggcacatgcctgtaatcccagctactcgggaggctgtggcaggagaatcgcttgaacccaggaggcggaggttgcagtgagctgagatcgtgccactgtactccagcctgggcgacagagtgagactccatctcaaaaaaacgtaaataaaataaataaataaagttgtcaacaaaaatgtgcacaagactgtgatgcagtgtgtaggtcaccgtggtgctcctgcccaaaacgcctaacccaaatctaaccatgaggaaacatcagtcaaacccaaagaggaactttctacgacgtgactagccttcactcttaaaaaatgtcgaggtcacgaaatacaaagaaagtctggggaaatgttaccgactcaaggagactcagagacagggcaaatgaatgcaggaggtgatcagagattttgttttgttatataggacattgtgggaaaattgacaaaatctgaatatggtctgatcattagataatagtattgtaccaatgttaatttcatgattttgataattttactatatttgcatatttgtattaatttgtaccaattgtgctatatttgtacaattatagtataatggtatataggagaatgtccttgcttttaaagaatgcacactgaagtattaaggggtaaagggccaacaagtctgcatttgactcacaaacacttcagggggaaatacgtatatacatgtttatatgtttctatgtgtgtacatatatgtcaatatatatttttgttttgttttgttttttgtttttttttttttgagacagagtctcactctgttgcccaggctggagtgcagtggcatgatctcggctcactgcaacctccgcctcccaggttcaagcaattctcctgcctcagcctcccaagtagctgggactacaggcgcgtgccaccatgcctggctaacttttttttttttctttgtatttttagtagaggcggggtttcaccgtgttaggcaggatggtcttgatctcctgacctcgtgatccacccgctttggcctcccaaagtgttggaattacatgcgtgagccactgcgcccggccctgtttttttctttatgtgtatatttgtaatcttggtgaaaggtattcaggaattctttgtgctacttttgcaacttttttaaagtctaaaattatttttttaatgagaagttatttttttcacaagcctcctgaaaaatagcgttataatgccaccattcaattacacggtaagacagtaataccccacctttctatggagcccttggaggtgccaggcatgtgctaatttgaggtttatctcattgaatcctcacagcaatcctaagaaggagatgctatcattacccccagttttcagatgaggaaaccttcagctcagagaggtgaagtgacttgcccagggtcacacagccagtaagtgatgaaactgtgtggctgtgctctctgaatccagagtaatttaaaaagtccaagtagcagcacataggatccacaacactggatgacaggggtcgcgctgttcagaggactgggggccactcccatggctgcagatcgaactctacaatcaccttcaaatgtgcctgggcctttgctatgcctctgcccaccctcctgctgctcctggcatgtgctgctcactgtctccaccagtccctctcctacttcctcttctggaatagactatctcttcctccatgtccgcttcccaagccctctacctgggagaacactctccgtgctctgtggttccacagccctatacctatccctttctcagggactatcccactcttttttttttttttgacagagtcttactgtattacccaggctggagtgcagtagtgcagtttcagctcaccacaacctccgcctcccaggttcaagtgattctcctgcctcagcctcctgagtagctggaattacaggcacgtgccaccacgcctggctaatttttgtatttttagtagacgggtttcgatatgttggccaggctggactcgaactcctgacttcagatgatccgtctgcctcggccacccaaagtgctgggattacaagcatgagccaccgtgcccagcagactatcccactcttcacctcctgctgcaattcccctggcaaagcagaagagtgtagctgtagctagctccagctggggactcagccaggcctggaaccaaaacctggctctacccatcactggctgtctgatcttgggcaagtcactcggcctttcttagcatttgtgttagtctgttctgcattcctataaaggaatacctgtgactgggcaatctgtaaagaaaagaggtttattgccgggtgcagtggctcacgcctgtaatcccagcactttgggaagctgaggtgggcggatcatgaggtcaggagaccgagaccatcctggctaacatggcgaaatcccatctctactaaaaatacaaaaaattagccgggcgtggtggtggacgcctgtagtcccagctactcggcaggctgaggcaggagaatggtgtgaacccgggaggcggagcttgcaatgagccaagattgcaccactgcactccagcctgggcgacagagcaagactccgtctcaaaaaaaaaaattaaattaaattttaaaaaagaggtttatttggctcacagttcttcagactgtacaagcatggcaccagcatctgctcagcttctggtgaggcctcagaagcttccgatcatggcagaaggcaaaggaagagcaggcgcatcatatagcaagagagggagcaaagagagagaggaggaggtgcaggctcctttaaacaacgggctctctcgtgaactaacagcaagaactcactcattaccatggggagggcaccaagtcacttaagagggatctatcccaatgacccagacacctcccagcaggctccatgtccaacattagggatcacatttcaccatgagatatggaggggacaaatattcaaactgtatcagcatcttttaagtcaaacagaggtattataacccaattcattataaagagtttttgggcatttaatataacatgtgacaagcaacaagtacttaataagtgttagctactatttttatgtcctatctctataatgactgttttacattttttcacaaaaattaattataagcatgtgttgaagttttattttaagcttgtcacaaagccaagtcagtagttcccttttgttatggatatttcaaaggaaaagagaatggttggataatcattattaaactgaatacaagacaaagaatgtatgataatcatccaaatggtttgggtagctaatttccccaaagaggttttaatcttgttaaagtttatcagaaaattgcttcagcatttatcaggaatgctcatgtcctcccagaaggaggttgtgaattgtatcacgaaagtgttctattccaggctgtgattgggatgttcttcttaatcatacccataagaatcggcagagcaccgtgtctcactcctgtaataccagcactctgcgaggccgaggcaggcagatcacttgaggccagaagttcatgaccagcctggccaacatggtaaaaccctgtctctactaaaaaagaaatacaaaaatcagctgggcgaggtggcatgtacctgtaatcccagctactggggaggctgaggcatgagaatcacttgaacccgggaggcagaagttgcaatgagctgagatcacgccagtgcactccagcctgggtgacagagtgagactccgtctgaaaacaaaacaaaagaatcatggccgacatttcctgagccttcactatgcatctagtctggagctgtgtcacaggcctggccttgaaacaggttctggatgcatttcatcattgtcaccccccaccccccagcatgctcagttcggtgtaggactctgcagatgtctacaacatgctgatgagatgggtgagtgggagcagcggccatcatgtcccaggcctttgcacaatgtgcaacatacaacaccctctccacaccaccaagatggaaataaacaggtttctgagagtagaaagaaccacccgttgctcccccagtttcattgggtatgagtttgtgctgtttgggagaatgacgtgctaggtgttttgtccaacaccataaagtaggctccttgtcagggagataacaaggcgctttgttctggccacagagccgggtagagcatccaaaggctcattaccaagcatggatgcctttcctctgacagacaatgaagaattggatccaagttgctcattaagttccttagggagttgttggacatcttgctactgtatgaacaaacagatggacctggctgctggctgcaaggatattttagaaaaagcaggtctgcctacccattatgaagagtaaaatattatactgggatggggtgcatcatctccaagctggtttgggggtgaggtcagtggttctcaaaatgtggtcctctgaacagcagcatcagcatcacctggaaatttgtttgaagtgagaatgtgcccgggtgcggtggctcacacctgtaatcccagcattttgggaggccgaggcaggctgaggtcaggagttcaagaccagcctggccaacatggcaaaatcctgttatctactaaaagtacaaaaattagcagggtgtggtggtgggcacctgtagtcccagatactccagaggctgaggcaggagtatcgcttgaacccggaaagcggaggttgcagtgagccgagatcgtgccactggactccagcctgggcgacagagcgagactctgtctcaaaaaaaaacaaaaaaaaaaaaaatgaagaagtcaggatgcttggtccccatcccaaatctgctgaatcagaaactcaggggaggggcccagcaatctgtgctttaacaagcattgtaggtgatttggatgcatacttaagtttgagttgaactgaatttttttttttttttgagacagaatctcactctgtcaccgaggctggagtgaagtggtatgtgatcatggttcactgcaacttctgcctcctgggttcaagtgattctcgggcctcagcctcccgagtagctgagattacaggcacacaccatcacacccagccaatttttttgtacttttagtagagacagagtttcaccacgttggccagactgatctcgtcaggcaatccacccactgcagcctcccaaagtgctaggattacaggcatgagctgctgcgcccagccctgagttgaattaaatggtaatatcttttcctctttccttcttatttcacttcctagcatcttctctttctcactatcctctcccatcccttctccctcacaaaccagcaacacgttctcagaagccactgggatttgatctaagcgctcaggtgggttgcaagaccttttgagagatcaccaggatgggagatgatcaagctccagaacactgttacattctcccagtggaacctgagagcagacctgcctggatgagctaggagacatcttgatggccatctccggccatgacagcacgtatttctgaggcagaaacaaatccggccagagtgtagagcctgtgctgccctggagccagctttaattgatcataagaatgtttggggcaaaatggcataggaaaagaacagcagtgggagaaaaggtgaaaaccataggtaaccacagagaggcctggagcaatggagctattcagagaaaaatacaacaaacagccaccaggatggatttgttagaacacatcagcattggccgggcgcggcggctctcacttgtaatcccagcaccttgggaggccaaggtgggcagatcacctggggtcaggagttcaagaccagcctggccaacatggtgaaacctcgtctctactaaaaatacaaaaattagccgggtgtaggggcacatacctgtagtcccagttactcaggaggctgaggcaggagaatcgcttgaacccaggcggtggaggttgcagtgagcaaagatcacgccagagtattccagcctgggagtcagcagcgagacgccgtctcaaagaaaaagaacatatcagcatttactgaagactcaagtggacttcctacagatctggggctgatattcagaggacgttcaaggaaagggtgactcctgaaggctggagaacaagggacactcctattacacatgcaaaaagaagatacagcccaacggctcatttcaataaatatttgccaagtgccagcaattctccagggtgcatgctggatttttaagcaggatgcaggtctggtacctcactctggtactgtggcccctgctaggaaactcttcagccacatcctcagccacctctgggttgacgtagaccattcaggatcccagggcagctccaggatgctaaattccaaaggactgaattgctatggactgaactttgtacccccaaaagtcacatattgaagcctgatgtggtttggctgtgtccccacccaaatctcaccctggattataataatccccatgtgtcaagagcagggccagatggagataactgaatcaagggggtggtttcctccatactgttctcattgtagtctcaggagatctgatggttttataaacgggaattttcctgaacaagctgtcttgcctgccaccgttagtaagacgtgactgctcctcattccccgttcaccatgactgtgaggcctccccagccatatggaactgtgagtcaattaaacctctttcttttataaactatccagtctcaggtatgtctttattagcagcgtgagaacagactaacacaaagcctaaccctcaatgtaactatatttacagatagggcctttaaggaggtaattaaagttaaatgaggtcataagggtggagccataatctgatagaattagtgcccttataagaagagacaccagggaggccattccctcgctctccaccatatgaggacacagcaaggcagccatctgcaagccaggaagagagctctcatcagaaattgaatcagccagcaccttgatcttggacttcctggcccccagaactttgagaaaattaacttctgttgtttaaatcactcaatctatggaattttgttatggcagcccaagatggcgaagatacgtccctctgcccaaccacaccaagctgtccagttgccatggctatactacagtttagggcagggggcaattcaagaggtggcctcttgcacagtgttaaatgggaagcaaagtcaatgtctcctctcttgttctcagtgttctctctaatgtacttgcaccctctccaagtcaaagtccagagaagggaaattgggacacccatgtgagcctcttgtcatctgcttctctgttccccttcttcttccttaatccctcaaggtcaaaaaaacaaaaacaaaaacaaaacaacaacaataacaaaaaaaagagcatcaggtaaaaaccttttgtgacccctaattatatctttctttctgactccagctaagccttaatggtagacaaaagtgtctactccacatccctgtaaaatttttgggaatagattctccaagtttgcttactggtataaaggagtaattaaaaaaaaatattgaagaatcctgccttgcaagcaaggctactgtcctgctgcataatcctatttttgaatgacaaagactgactaacactgtggccttccttggcattcaaatctccccctagccaaaaggatgccagggatatattagagaaactatgatgttctgggaaagaaaaaagagaaaagcatgttaaaataaaaaaaaaaaaaatcaccccaatttgcatatatacatataaatcttttttttttttttttttgagagtttcactctcaaaactcctgggcaataggagtttcactcctgttgcccaggctggagtgcaatggcgcgatctcagttcactggaacctccgcctcccgggttcaagcgattctcctgcctcagcctcctgaacagctgggattacacgcgcccaccaccaagcctggctaatttttgtatttctagtagagatggggtttcaccatgttgtccaggctgatttcgaataaatcttcttttaaccaaaaaaatggtatatcacattttacatacttccctgctctaagcttcatttgcctaaaattgtatcttcatctttctatcttggaacatagacatctatcttgctgtctacctctatctccctactccaagtcaccaatatctgtcacctagacaactgccataatcttccaactggtcaccttgcttccactcttgccctggtataatccgttctccaaacagagagaaaaacattttttaagtaaaatctgctaatgtcaagatttctgcttctaaatagaagggagtagttgacaggccaatgtttctgctaagaactggaaagggtggataaaatagaaaaccatcgttttaaaggcattggagagctttggaggcaaaggactggaagcattaaaattccacaaaggggaccaggggtggtagctgacacccgtaatcccagtactttggaggctgaggtgaaaagatagcttgagcctaggaggagtttgagaccagacagggtctcaacatagcaagaacctatcccttaaaaaaaaaaaaaaaaaaaaaaattagtggctgggcgcagtggctcacacctgtaatcccagcacttttggagaccaaagtgggtggatcacaaggtcaggagttcaagaccagcctggccaagatggtgaaaccccatctctactaaaaatacaatagctgggcgtggtggcgggtgcctgtaatcccagctactcgggaggctgaggcagagaattgcttgaacccaggaggtggaggttgcagtgagccgagatcgcaccactgcactccagcctgggtgacagagcaagactctgtctcaaaaaaaaaaaaaaaaaaaaaaaattagctgggcatgttggtgcacagctcagcctcccaagcagctaggattaaagataaccattagcattctttcataatatttttaaattaaggtatttatattgctttggacataatgctattgcacagttaataaactacactatagtgtaaacttgatttttttacacaagggtcttcactaggttgtccaggctggctttgaactcctgggctcaagaaatcctctgccttagcctctggagtagctgggactacaggtgcacgtgccaccacacctggctaaaataactttaatgcactaggagacaagaaaatgtgtgcaactcactttattgcagtggtctggaaccaagcctctgaaacacagctacatatatttatctgggctgggatctccttgaggacacaaactgccttactcacccttgtatccttttctccagcttagcgtctggctcccaagtaaatgcacaatgctttttgagtgaatgagcctcactctcccagctctccattctcctggctgtcagttctgctgtggagtctccaaccagctgcttcctcaggccctcatactgggcacatatcccagcaagggccacgcctccttgacctaatcctggctcttgggccaccttggttaatggactgctcttctcagagttcctcaggcccttaagacctgggatggctcctgcctcacatgcaacagtggcgagaggcacccatgatgatctgatgccggatgaaatatgcagacttaggtactgtattactgcttagacttaggtaatgtattctactgctgtcccctccactgtggcagacatctgtcatcagttacagcttcctcaagtggacccagattccttcccctggcatctgttcaagcagccacagccagttggcaaaaggtggcaaaaaagtcaggatggtcctcaaaggccaaggcagaaaaaggacctgtgacttctggatgcttctgcagggaactgactgctggtatggtgcctttaaacataaatgcctgccccttaggccaggcatggtggctcacacctgtaatctcaacactttggaaggccgaggcgggtatttacttgaggtcagaagttcgagaccagctggccaacatggcgaaaccccatctctactaaaaatacaaaaattagctgggcgttgcggcacatgcgcatagtcccagctacttaggaggctgaggcacaagaatcacttgaacctgggaggcagaggttgcagtgagccaagatcacaccactacactgcagcctgggcaacagtgaggctgactcaaaaaataaaaaaacaaaaaacatgagaaaaaaaaaaaacaaagaatgcctggcagaccattaatgtgccaaattcatcaagacaggcttaccagcgtgatttttgccccaactccagccaaggtggttttaacttcaagtggggagattaactgcaccttttcaccatggcccctgggacatgtgtagattcctccctctgtgaatcagagatgacagttcatgcgtgcacatccttagatcatgtcattgctgcaatttttctttctcttaaaaacaggtctcactctggcacccaggctgggctgcagtggtgccatcattaactcattgaatcctcgaattcctgggcttaagcaatcctcctgcctcagcctcctgagtagctgggactacaggagtgcgctaccgtgcctggctaattttttgtggagacggggtctgctgcctaggctggttttgatctcctggcctcaagaaatcatcccaccttggcctcccaaagtgctagtaatacaggcacaaggcaccatgcctaggccttgcaataagtgactttaccctaatctccaaagcctgaacttaagagtacccctcagttccatcaatggcagctgctccatgttcaccctactcccactgttaccccataacctgtcctctcaagctgacaccatggatttttacatcccacacatgctgaccaacttgtcccagtttgctcaagatctccctgggtttagcaatgaaaaacccactttctgggaagtccctcaatctcaggcaaactgggacagttgatctcacaagtaggcatttacttatgagccacgtcatccaggacactccagccttcctgaatgacatcagacctgtctcactccataatctaccctgactattctgcaatgccctgaattatcatgggtcctaaatgcctaaatgtgaaccaactaccagcacttgttcacctcctagttccaaatgtatacctcaaacaatatcctctgagccaaggaagagtgaaaatcagatctggcctatggcctaccttctccaaagccagcctggcaggctcacaggttgtcactgatttaagaagcacatggagcaattctgtaaggtttattgaatgggtgggtaaaaagtgaacgacagctacaaattcaaaaataaaactcttggttattaaagtcattccaggcatggacagagggatgcgaggctggccttccctgtccacggtcctctgaggcagctgaagtctcccatgtctggaccccgaatcttgtgcagattgaacagtggatccggggtgctctgagcaggcagcagggagcagctctggtgacgcttcatgtggtagcctcactctccattctctgcccctctcgtgcccacaaacaccaccaagagattctgaaacaaaggacaagtgagaccagtgatttgaggttcccatctgcataaacacggaccagctgagcctctggctgtgggttctggctcttggcatcaactcaccacggtgagaaatatcagcaaacccagatcccagatcaccaactccatggtcttaggacttccttggactgtccttggatctaaggctgagacctaagagggtaagaaagcatacaagtatttagtctccagggccatctcctcctccccaagctgacaccactgagaggggtcccattcaagcagggcgaagctcctcattcacgcacaccaaataaaaaatcccaacagaaaggacatgaaaggacaaacatcttagaagtttcgtttttctttcaagcagttcacaatcggggcaaatgaccagctagagtaatccacaggaatacagctttcctagccccacctgcaactttctccatttgttcgacattactgatggtgcctgtggaaacaatgtggatttcacatttcatgaagcaaagcccgtgattcgcagttctcacgtgtgcccttcactgctatctgaattcattccagcgtggggcccagagagaaatgcagactggtttctggcaggaggatccctaacatgaaaagacaaaatgaaccctcagaagtcagggggtgggtctagtcaccacatcacatgggcccacaaaggcccaagctctgaaagcctagttggaaaaaggctgcagcgtgggaaagctccagggtttgaaagggaaggctggaccaacgcagggaagatgtctttcagcactcctacccctgcactgttaatgatcgggacacaggcaacccatgatcacttttggatacaagagcagggaaggacagaaagagagccagcaagggagggaggctggtgtcaagggcctgaggcagggagagcagcccagctgagcagaggcccagccacggccaccgtgtgtccttctaagaccccaaaaggagttaagacacttccagcattaaaaaaatggaaacgcttttgggttggaaaaggtcaggagcatatggtcctaacatcatacacacacaccctgaaagaaaaactcactgctaatccagatcacagcacactatggacacaccagcgctcaagggaggaggacggttcccccggggagctcactttacccacgcagatttccggaggctcttcctctgcaacagccactgaaagcatgtgagggacagccccacagcaggacagaacgtggaaccacgggataccactttcaccttgcttcccctacatcatccaagccccaggaacagcacatgactctgcaggatgcaaagaaacatattccagacaacagtccaaaaatcccaccttgcggacccatggtccagcgccctgctactatgaagacaacacatcccatggagcctctgcacacagcagacccatctgaaacagacacagagaacacttaacgcaggggctggcagatcataagcaacccacaaatgccactgtctctattagtacttacagccacattattgtctcaggaacaagaaaaacgtaactctaggaagaggtcggcaaactatctgtgagaaaaatggcatctatgctatcctatgtgcccactctgtgctgcttatcagtatacattacatagacccagctatccctcttctggacacatactcaatggagatcaaatcacacctcataaagacatctgcactccaatattcactgcggcattactcccaatcgccaagatacggaaacaatctaagtctccatcaacagatgaatggaaaaagaaaatgtggcatacgcacacacacacacgcacacacaacaaaacattattcacccttaaaaagaagacccttggccaggcgcggtggctcacacctgtaatcccagtactttggggggccgaggtgggtggatcacttgaggtcaggagttcaagaccagactgaccaacatggtgaaaccccatctctactagaaatacaaaaaattatccaggcgtggtggcatgcacctgtaaccccagctactcgggaggctgaggcaggagaatcacttgaacctgggaggtggaggttgcagtgagctgagatcgcaccactgcactccagcctgggcaacaagagcaaaactccatctcaaaaaaaaaaaagaagaccctgggctaggcatggcagtccatgcctgtaatcccagcacttttggaagcgaaagcagaaggatggtttaagcccaggagttggagaccagcctgggcaacatcgcgaaaccccatctatacaaaacatacaaaaattaaccaggcatagtggcatgcacctgcagtcccagctactcagggaaatgaggtgggagggtcacttaagcccaggagacagaggttgcagtgagcaaacacagttcactgcaacctctgtctcctgggcttaacttcagcctgggtgacagagggagaccctgtctcaaccaaaaaaaagaaaaagatagagaaagatcctgtcatttgccacaacatggatggacctggaggatattatgttaaatgaaataagctagacacagacaaacagtgcatatctcacttatgtgtgcaatgttaaaaaaaaaaaaaaaaggtcaagcatacaaagatagagaataaaatggtaattaccatgggcaggagctgaaggaaatagggagatgtaggccaaaggacaccaagtagcagatatacaggatgagtaagtctagagggctcacgcacaacataagggatttctgtgaagcaggtttcagctgctcctcacacacactaaaaacggtgactatgtgagataacagacatgctcatcggcttcaccatagtaaccactgtgctatctatatctgtcccattattctataacatcatgttgtaaactcaaatatagacaataaacattttaaaaacaggttgggtgtggtggctcacgcttgtaatcccagcactttgggaggctgtcccaattatttgtatcacataaggccaggacttcgagaccagcctggccaacatggtgaaaccccatctctactaaaaatacaaaaattagctgggcgtggtgatgcacatctttaatcccagctactcggaggctgaggcatgagaatcactgaacccaggaggcagaggctgcagtgagccgtgtttgcaccactgcactccagcctgggcaacagagcaagactgggtctcaaaaaaaaaaaaattaaaaaaaaaagaaaaaaaggatgccaaggcaagaaggcttttggagcaggccatgcctggcagtgatcagcacagacctgggatgggtaatgaacaggtggggtgggagagccccgcacctaccatctagtgtgtaagagctgcattcatacatctgactatacctatagcatattgtctcccccgattactactctagcccttgccaccttaatctaaggccagaaggaaaatccacctctggtagaccatggacgctcctcacagccaggactgaaggtggactgtaacagctggcttgttctaggacatttttaaccccagcactgctcaatgggataagccttgtcaccttacaacaatgtgtcttctcatttactgtttgtccaggtgctacatgtcagttaccaggcaccatgtgaaacaagacagaggcactgccctgaggaagctcacagcacagtgggcaggagaagcaaaccaacaattcccagacagtgtgaccagtgctgagaggtgggaaggagtgtgatggggaggcagagagagcttctggggggagctctaggaaggggtaaccactactgtggctccaaaactagctcagagacataaactcagtgtggcaggtccctgcttcactgtcctttgacaggagcctctgagtcccatgctaggcacaagggacactcaatgaaccatacagcaccagtgtatggtagatgcatgtaacaatagcttcttaggaaatgagggttgccatgtggaggttactgggggaaggtgctatataatctgcatgcattttacaagtggatgaggtgcccccatccagccccccaccactagactgctgactgccctcaagttccccagataaaccctgtttccttcactggctccaggtctcttctccggcctgttgaacctggtgccatccctaatgaggtaaacaggggtctggcacgacaaccaggtaccaggaggtaacatcactggtgagaataaaggcatgtacgaaagctccagagtttggaagggataggagtggacccttcaaacacggggaagcgctttcattgattcctctccctgcactatcaatgaccagggcaaaggcagcccacgatcactttcgaatacagggacaaaatagggcagtgagtgagttgagaggggaggcactgacagcagcttaggaagggcccaaactaagagacctggaaacaagtcagtgaccagatttgcagcctagaattgcagcagctgcttctgattcccaaagatttctaacatggtttgatttcccaaactttagcatgaatacgaatcacctggagaccatgttaagccagattgctggctccagatccaaaacttctgatgtagtaggttgggacagggctaagaacttgcacttcttacaagttcccaagtaatactgatggtacctggttctgggaccacagtttgagaaccactactcaaatgcttccctcataagagaatgagatggaagatcaactctgggtgaaatgttgagaattcactggattaggaagtcagggattgtgtgatactatccacacgtcggccaggcctggacttactatccataatcccagcactttgggaagccaaggtggaaggattgcttgagcccaggaattcaaaacgagcccaagcaacatggtgagactccgcctctacaaaaaatttctaaaaattagctgggtgcagcagcacgtacctgtggtcccagctactcaggaagctgaggtggaggatcacttgagcccaggtcgaggctgcagtgagccatcattgcaccactgcactccagcctgggtgacagaatgagaccctgcctcaaaaaaaaaaaaaaaaaaaaaaaatccataaatcacttcataacaaggatcgccaccaagtccagagaaaaccactagctaattgcctgcctccaaaatgcagtactcctcccacttcaacaaactatgccaatccacactaggatgactcagagcccaaggggagctctgtaagccccaccgtgattcacacagtggagtcgcagagttcgaggaaaagagggtgtcacatgtccctgtgggcctcagtggaagagcaagcaatgggaagcagcctctgcctcccctctagtgacctcaaagccttcgtccttgcggcctgaacaccagtgcattctctagagaagcacccaggattcataccttacaagcaccgcagctcagcctcttcttgaagacacgtcacctggggccactgggcacacaggacagaggtcagctgacaatcctgcaatgacaagaagccacacatatcacttcttataacacattccactatccaacatgttcaacaggaaaaagcgacctctcaatcggggtgggatgggctagacggcggctgcatcagtgacttccccttggtcctccctctctagctttattcctgatcttacaactccacccattcctccaggggcaacctgagaaccagtcatcctcaggggagccccaaaggccagcacaaaaggcagaggaattaagagctggaatggtggccagtgagtgacaccaatgcacacctcagagggtcgagagaacaggcgaaactcttgggtgggaagtgagggaagtgttttgcctctcagaacccggctgtgctccccttgcagcaatgagcactttctctttcttacgacaaacccttcaggaccccctattccaggccaatgacatgtaaagatgtaaagatgctaccctatcctgtccccaagttacacatacacacacacacacacacacacacacacacacacacacggggtcagccctgctcaccccaacctcaaagtctccctcatgtttatatgccaatattgcacttattcgaaactgtgctatccactgcgacacaccatgactcattacatatcacattcccttcctgatctacccctcagaacacagagcctggtttctgcaaagagaggtcaagctgagaaagacttaagcatgatgcccccccgcactgactttcatgtggcagccaagcaagcgccggactcctcaagggctggcaggagagcaacaggagttgtgtgaaagcttcagggttcggatgggatagggtggaccctccaaacacggggacaacctctttcagcgttcctctccctgcactatcaatgacctaggcacaggcagcctatgatcactttcggatgcaggagcagaaacagacaggagagccaggaagggcaggaggatggtgccagggcctgtgggatgacccaagtcagggacagtacaagactcctgcagctgccatctgtcctgtaaaatcccataaaacctaaccaccaaggggaatcaaaggggaaacacctctgacaaaagccctggaaaaatctggggactagagagcaggatcatggggtcacgtctgtaaaaatcaattatgccctacctttgttttctgtatcaggaaattgagattcaaaacaggtcagatggcccttggctggcatctgggaacttggctctcgggatgttcctagtcaacagtttactgatcagaaccgttcactggacacagtctctccgtgcaaataatgtggcacaggcacctgttttcctgaaagtctggaattttggtgcgtgctaggcaggtggtgtctacataaccagatcccagtaaacaccccgggcatggaggccctactgggcttccctgggcagaaacactgcacacaggctgaatgcattttcactgctgaggggagaatgggttccatgtgatttctgagagagggagggagcatgaggaagctggcacagggattcctccagactcaacctgcatcttttttcctgaatcatttggctgtgtacccctacaatgttgctaggttaaatcttaaccattgattacaactggaaagaaatccagccactttccattatgacatgctgctaatgcactgcaggaaaagcccccagcgctcgccccaggcagctccctgcaggggcctcctcctccacagcccctgaaggcacagaaggaggggccagctccaatccagctttcccagggaagaggagtctggatctgggaatccataggacatggctcctcttctcatcctcacctctccctacgtcaccaccaaagcaccagaaaaaaaggggacgtgactttacagggtgcaaaaagccaaaattccagagatggacaagaaaccttacctcgggccctgcggtctgccactctcctgcaacacctctcactaagcatctctacagtgttgcatagatgctgactaaaccgttcttctcacctgaacagccatgacttcttttaggaatgaaatagcagcttatctctaagaaaggggctagagaacttctaaggcagggatgatatccgcttcatctgtcaggccaactgttactaagttcaagaggatgctggggccatgatgatcttgggatgtgctgtttctccagcagcgtccagcaagcagctggggaggtcgtggggaagccgtgcagaggctgctgccgtaaatccctcagtgatcttctcccctgcctgtctctggtccttgattcctttcccacaagctggagggaaaatcctccccatacaagggaaatcctccccatacaaggctggagggaaatcctccccatacaaggccaaggccaacagaaatgagttacctcagaatcctgtgaaggggtggaaaacaccaaatctgctcccaccaatcccacacaggtgctgactcagtatttttctccaacaccccaaaatgtaatgaacccgatctccttacagtggagggactctccctttctcgtttttctttcttgagacagggtctcactctgttgcccaggctgagtgcagtggcatggtcatggctcactgcagccttgtcctcccgggctcaagagagcctcctgcctcagcctcctgagaagctaggactacaggggcatgcaccgccatgcctggctaattttttagttcttatagaggcggggttgcccaggctgccgtttttcctttgtcccacactgtcagaatactgaccatctggcagacataacaaagtagggaacaaaattcagacactgcccttgagaccacagcaaagagagccaggaaacaagtcaggcaacaatttccacaggttcagcttggtgcaggggctggataaggacgtggaaggagaggtgtggaggcagagaaagcttccgggaggaaggagcagggcagccctatctcagctccacacccagcccttctgctccatgaggccaaacccatcaccccacacccttccctcatgtctcacaataactgccctgggccagggagaagagcaacacaacccactagatgatgccaggcaccaggagccatctaagacgtggtgggagggaggaggtgtgggaaagctccagggtttggaagagacaggagtggaccctccaaacacggggaagtgctctcggcagttcctctccctgcactaccaatgaccagggcacgggcagctcatgatcactttcgaatgcaggggcagaaagggcagagggcaagcccagaaaggaggccaatgctggcattccgggcaatggtctcacctggaacagaacagctgacagggcaatgagcagacttacagcctaagattacagatgctgcttctgactcccagagatcacttaccactccctgccagaagcagaaaggaaggcaaacatgggcagaaatattgagaatcctggggctcttctcaaagactgggctggccgggtgcagtggctcacgcctgtaatcccagcactttgggaggctgaggcaggtggatcatctgaggtcaggagcttgagaccagcctgtccaacatggtgaaaccccatctctactaaagatacaaaaaaacattagccaggcatggtggcaggcacctgtaatcccagctactcgggaggatgaggcaggagaatcatttgaacccgggaagtggaggttgcagtgagtcaggatcacgccattgcactccagcctgggcaacagagactccgtctcaaaagaaaataaaaataaaaataaaaaaataggccgggcacagtggctcacacctgtaatcacagcactttgggaggccaaggcgggtggattgccagaggtcaggagttcgcgatcagcctggccaacaccatctctactaaaaatagaaaaaattagctggacatggtggcgggcacctgtaatcccagctactcaggagactgaggcagggagaatcacttgaacccgggaggcagaggttgcagtgagctgagatcatgccattgcactctagcctgggcgacagagcaagactctgtctcaaaaaataaataaataaataaataacagactgggctggagggtatcaatattggctatctgttccactgaggcttacataagactgctcagccgggcactgggtatgaatccaggcttgaatctgaaacgcagcccctctgtccattccaacacatggttttcctctcaacatgacagggtctttgtcagggactctcagagccccaatcaagctcagggagcaccttcttggcagcagccccacgaaggcagaagagggcccaggcctgtccctgcctgctgaaggagcaaagacaggagcaaagggaagcagccttcaccggtgtcctcactccccactcctcagcacccaaccacctctggcctcacaacctgcagagaacttgagctctagaggactgagcaggaccccacttacctgggacctcaggatccatgctctcccagaggacgcctctcacacacatggggcggcagtcatgtgacactcctgcagggcacaagaagccaagatgtgactgatgcacttggcactgcttatggcaagtccaggaaaccacgatattcacccacagaaaacacaccaggggaatcagtgtctcaggaggtgaatgtactgacagcttgtctagcccatcctggtcactgacacagtcccctgaggtcatcccgtctgaaatggacaatggtgcctctacacaagaggaaaaccttgtaacttttcctttattaccaataaccaagacacaagcagcctgtaatcactttgcacacaggggcagaaagagatccagggcttgttgaaattggagaccaacgtcagaagcctgaaaaatggcctgagccaggacagtggcacagcagagcacaggatgaagcagcttccatcttgtcccacataaacggaacctgccccaaccaggagaagtaaaggaaagaccctccagatgagaaagctggcagacttcttcggacgtggaagatagggacggtgtgatcctaagaaaaatcacctcagcgtactcctgttttccagacgagaaaactgaagatcacaaaaagaaccaaagctagggagtagtggtaaagcgtttgggaccaaggtacaggtaggtttgatgccaaagccctccagcttttgagtcagatattccaagacacaacaatgataagggatccctaaagatgctaaacccaagcaggcacaagaggaacccaatgtattcatgatggccccaaagagggtaaaactggggccagcacaaagacactcttacctcacctctctctacttcccagacatcacgcccagggaacctgcatgcacccacccttgtgggacacaaagccccagatctccagaggacagacctcatagaacaccatggtccacctgcttcctggcagggtggagatacctctcatgggcctctctgcaccaatcagcctcctctgccagaatcaagaagccctggatgagctatctagacatcacctggtcaaacccgttctggaaaggacaaggagagtactggcacagaagccaccaggtggtaaacatttcctaaaagttggctagtgttaacagtggtctacggtctcagcaacacgaagagttcatctagagaagaaccagtcatcagggacagcttaagtctcatcttatgcacatattgttgaatttgtgatcctgaagcagtacactgaaggggactctgaacctaggacaggttctggtgtggcacaccagcgtggcgcagtctagcatacacagtaagggctatgatgggcaggatggcccatctgtcatctgcgggtcagggctgattacacatctcactcttctatcagccatgcctagctatacctctggctttggtcgctgacatcacaatgacaatcctgtggggaaattaatcctggtggcccacggacaagaccgtcaaagagaacaccatgggatgaccactgggccagtgggaaatagctctgaccacccccacacaggctgccttgctcaaaactacttccctgacatgcatcaatgtgctaagccctgtcaccttacaactgaagtcttttttgttgttgttgtttaaagacaaggtctggctctgcagcccaggctggaatgcagtagcacaatctcggctcactgcaacctccacctcctggcgcatgccaccacacctggctagtgtgtgtgtgttgtagacaggtttttgccatattgcccaggttggtcttaaactcctgggctcaagcgatccacccacctcagtctcccaaagtgctaggattacaggtgtgagccaccacgaccagccacagttgtctttttccagctcctgttttttgttttttgttagggacatagtctcactctgtcgcctaggctggagtgcaggggcatgatcttggctcactgcaacctccacctcccaggttcaagcgattctggtgtgcctcagcctcctgagtagctggaattataggcgtgtgccaccacacctaggtaatttttgtattttttagtagagatggggtttcaccatgttggccaggatggtcttgaactcctggcctcaagtgatccacactccttggcctctcagagtgctgggattacaggtgtgagccattgcacccggcccatctcctgtttttcatttgttccataactgctgaaaatcaaccatctaccaagcaccaggtaagtcaagagacaggactcagatactgagacaggcgaagtggctcacacctgtaattccagcactttggaagactgagggaaaatcacttgaagccaggagttcaggaccagcctgggcaacatagcgagaccctgtctgtcccagctatttgggaggctgaggtgcgaggatcacttgagtacaggagttcaagctatgatcacgccactgcacactgcacctcagcctggacaacagagtgagatcctgtctctaaaaaaatacaataaaatattaaacaaaactcaagacactgtcctcaaggtcacaatagagagaggcaaagacaatcaagccagtaattgccacagggtgtgactagtgggggctgcagctgtggtttcaccaccaatcctgaggcagggactcacccctcatagaccctggtgaacgcctcatggaaccctgcactgagccttgcacagggagcactcactaataagacaccaagtgccaggaggcatttgaaagatggtgagaaggaggtgtgagaaagctccagagtttgaaagggacaggagcggaccctccaaacacggggaagcactttccgcgatttctctccctgcactatcaatgaccagggcacaggcagcccacgatcactttcgaatacaggtgcaaaaaagggcaggtgagcccacgtcagcgtgttagctgccagatctccagagggaggctcaccccccagggaagagaagggtacccaggaccctgagagccatcatcacttcacaggcagattccatctgtccccacccagagtccacaggaaaacagacttctggtaaaaatgcctcggctgtacattcagcccaccagttctgagtatctacacgtggacaggcaccgtgggttcaaaatcaagaaaaacagccaaggcctctgccctcagagagcctttgcagtttccctactttacagaaagtcaacctcaggggaatgaaggaacttagctagcatgtgaccccaagcgcagcccgtctcctaagtcacgctttgctctgcacccgctttgccagacagttctcagaactcagaactggctgagctcattgactgtcccctctactgcgtcccacagaagggtccttccccaaggtgcgcagaagcagcggcacttacccaggggcattctcaccccgcggacagtggaagcccctcagggggtgcagatcagagtgctgcaggagagagagggcgctggctggtgcgaagccgtccgaggtgcagcacagcccacaaggcctaggcaaggaaaaagcacggggagggggctttagtacaaggcccggggacagaagtccagactctgccccactggagtgctggcagcgtcttccatttaaaccacagctaactggtctgtaaaatgaaggttctaacacctacttttaaaagttattgaggggaaaacgagttaacggtctcaaggacgtggcacaatgactggcactttgtaggcaacagtcaagtggctttggaggcttccaatgccaggagtcgggggcgggcagctaaagtcgccgagccctgtttcccgccatccaggggcactaagcctccccgcagagtagctgcgcggacagggggtctgacgaccgcacgtggcccgctcagcactgccgcggccaagggcgcgactcacctgccagtgtctttcccgaggacacgcgaatcctggggggctcactccggcaaagaggacgagacactgcaccaaggacagggcctgacctctctggccgccttccccggggcctcagtttcccccgatggtgagagtggagccgaccatgcgccctgctgtggactcacccggcgccctggcgtcgagtggcggcggagacctgacagacagcgtgggaaaaatcaagatgtctgcagatttcgagagatggggtgcggtggcgtgcgatggcgaaggacggcgagggacggcgaaggactgaggccacacgacaaggaagctacgctcgtttcgcgccggcggaaatacagacgagagcgcgagctgcggcctagagcggtaggaaccgacgcgagcagtcctgcagcgtcccctggcggagcggaggctcaacgccagactctggaggacttgggataattttcgaaaactatctggaagtttagaagtaaacttctcccacttgctttgcttttctgtttgttctgaagatgttccttggtcactgattcattattaatctgtaggaatggccaattttccatgataggagctgttactacgatgaggggactgtgcttagtttggacttctttctgcaagggtccaaaggcatctgtctttgattcaccactgtactcagtacctagttcagtgactagcacagttgaatgaatgaattctacccccgccccattcctttttttctgaacaatgtcagaccgagatgactgagtcatggcctgagactggaatgtgagcgtgagaagatgagccaagagagatgcacagcgggtaactgctttgctaaactccagcctcaaagtacacgggatggagggtggaaagagtctctgaagcagaagagacctgaccagactggcatctgaggaacctgatcagatttgcacagtgacagagactgtagacagatgtcccatgttccctgcaacatactggagacaatcttgggaggggactcatggcccacaaatcctcataagcattggcactgcctgcaccctgggcaggatgtgcctcttcggcctgagacagccctgctactgactctgcccatgttctggagtgcaagcagcccacccttgggcctgatgaggagcccacgccccaccctccgccccgctccagtcagattcttggtactcaataggtcagaaggacaagaaaatccagtcctgatctatgcaaccatgagggaaatgggggtccctgaggtgagatctgctccatattttgtacctgggagaggcccatgggattcccagactgtgagaacactgggagtctctgtgatggggaggggctgtgggatgctgctatggtttggctgtgaccccacctaaatctcatctggaactgtacttcccataattcccacctgtcgtgggaggtaatggaatcatgggggtggttacccccatgctgcggttcttctgatagtgagtgagttctcatgagacctgatggttttataaggggctttacccacttttgctctatacttctccttgctgccaccatgtgaagaaagacatgtttgcttccacttccgccatgattgtaagtttcctgaggcctccacagccatgctgaactgtgagtcaattaaacctctttccttcatgaattacccagtctcaggcagttctttataacagtgtgaggatggactaatacagatgctgtggctgagaggacactgggcagggtggtcaggtgtgcccacttgtggccacacagccctggtgtcctcttctgcctcccactcttgctgttactctccatgtgactttggctaagtgacctaacttctccgccccgcctcagtttccagttatggaaaataggcagtcatagttccctgctcatagcgttgctgtgagaattaaatggaatgatttatatcaagaccgtagcacagaacaaatatccaaggcctagtagttgctatattatagtatttctgagaaagctgagggcttctgtcaccgtaaggactctgggattctttatgaagcagaggaaatgtgctgtgtttgaaaagtctaagatggcattgtcagcccggtgtgatggagcagtcctgtagtcccagctactcaggaggctgaggcaggagaatcacttgagcctgggaggttgaggctgcagtaagctgagatcacaccactgcattccaggttgacagaacgagaccctgtctcaaaaaagaaaaagaagaagaaagatagcattgtccaatagaaatataacacaaggccgggcatggtggctcacgcctgtaatcgcagcactttgggaggctgaggcaggtggatcacctgaggctgggagttccagaccagtctgaccaacatggagaaaccccgcctctactaaaaatacaaaattagtagggcatggtggcacatgcctgtaatcccagctacttgggaggctgaggcgggagaatcgcttgaacccgggaggcggaggttgcgttgagccgagatctcgccattgcactccagcctgggcaacaagagcgaaactccatctcaaaaaaaaaaaaaaaaaaagataaaaagtaaaagtaaaattaattttaataatttaactgaatataaccaaaatattatcatgtcagcatgtaatcaatattttataattattcatgagctatttactattctttttcttgtatgagatctttggaatctggtgtgtgatttacatttatggtacattacaattccgactggccacgtttccagtgctctgtagtcacatgtggctggttgctgctgtgctccccagcacagatataaggcaatctggctctcatcagccctttggagctggaagagacacagcaaacagtaggctgagtgcatccacaacccacacccacctccgccgccctacctatgagcctgaaagggcttggcctcctgcatattcagattgaggcctcaccaggctgaatcttctgggctggcaattaaggccaaggtgccctcagaaagctgggaacgggcagaactgcagattttctgtagttccagattttcttttgcactccttattctcataacactaaggagggcaccttggcgggttcattcctgcagccccagtgcctataggaggatggacacctaagaggagtggttcatgcttgttccacggtagtggaacaggatgttaaattagccgggcgtggtggcgggcgcctgtagtcccagctattcgggaggctgaggcaggagaatggtgtgaacccgggaagcagagcttacagtgagccaagatgacaccactgcactccagcctgggtgagagagcgagactccgtctcaaaaaacaaacaaaaaaaaggaagtttcagctgacaaatgacaaggtcaggagttcgagaccagcctggccaacatggtgaaaccccatctctactaaaaaatacaaaaattagccaggcatggtggtgggtgcctgtaatcccagctactcgggaggctgaggcacgagaatcacttgatcccaggaggcggaggttgcagtgagctgagatcacaccattgcactgtagcctgactgacaagagtgaaactccatcaagaaagaaaggaaggaaggaaggaaggaaggaaggaaggaaggaaggaaggaaggaaggaattgaaaatccaataaaattgctgttgtgataagcaaaaattgatttgagtattggcagtttttgaagtttccgtgataaaatagcagctgccttccaaagaaggtgctggaccaaatgcagaactgaggaaggagataaccgaaacatcgttgcttgtgactcttgaatcttctcttccaattggagggtagtaatggtacagtattagaaatgaaaaagaaggcgaatgatgaattgtatttcttatgaaaaagcaagagctgtgagtctcaccccctgcccccaaaagggagagacagggagggagcccgtgcatctcaccttaactcattaagaagcactttagcaggtcacaagggagcttgacatttgtcactcaaagttggggagcacaggtgactggggcccaacccactcctgagtcaaaggttcatagtctctttctgtaggagtagaatctgtggtatgaatgtctgcctgggacccaggaggtcccatccatgagggaacctgctagggtgagggaattccaagaagagggtctgtgcacacatcagtagggatgcaacaggcaacaggaggagtctctctgaagagcccatgagaaaggccacaagatcaacctctgagaagcctgggattgatagggaaggccacaagagaaataatcaggattaaacatctccctagcttggagagggcgcgggcttcttacaaaagcaacagacaagagacgtctccccgctccttaccctttactctacctgtttttatcctggaagtattgagagtgggtaagtggacagaaaattcctgttgaagagaaacatatctggatacatgaagagagaagccccacgtccctaccccagcctatcccgtacttagccccagctggtggagagaagtcttacctatggaagatcattgaaaacatagtaatgcgttagactgaacatttaaacttgttgaatggattcagcagatccttaactaatcctggtggggtttttttattcttttttgagacagattcttgctctgtcgcccaggcttgagtgcagtggtgtgatctcggcttactgcaacctccgcctcctgggttcaagtgattctcctgcctcagcctcccgggtagctgggattacaggcatgtgccaccacgcctggctaatttttgtatttttagtagagatggggtttcaccatgttggtcaggctggtctcaaactcctgacctcgtgatccacccaccttggcctcccaaagtgctgggattacaggcgtgagccaccacgcctagcctttttttttttttttttttttttgagactgagtctggctctgtcgcccaggctagagtgcagtggtgcgatctcggctcactgcaacctcccactcccaggttcaagcaattctcctgcctcagcctcctgagtagctgagattacaggcgtgcgccaccaagcccggctaatttttttgtatttctagtagagatgggatttcaccatatcggccaggctggtctcaaactccgaccttgtaatccacccgccttggcctcccaaagtgctaggattacaggcatgagccaccgtgcctgaccctactggtgtattattaaaaaataataaaataaaattgttgaatggaaactgtgttttccatttttagtgattgcaagactttttattacctaagaatgatcagagaaattctaaggcttttgccttatatttttctaggggcaggggagagacgctcccacttagcaagtctaagcagacatatcaggagtcctgctttcaacatactcgttgcaaaggattggactgtagctgggaagacaaggttccaccacaggaagtctgtgacctcatagtggctgagaaatccctggggcctggagccccttcaccagaagagatggaatcatggctggctggacagcttcttccaaggagttggtgcccggagtctaggtgggaagtcagcaactgaccatgcaaggcctgcaggagctccagacccatctccacaccaagagtgaccaccgtgctgcagattttgttgtatctgtccattctcctcctcggcttcttactgctcctctgttactgcgtctttcagtagcccatttgggtgatgagcactctctgggggtgctatgggggcatctttggagcttggcagcagtgtgctgtgatagaaaacaggtagatgggctgggcgaggtggctcacacctgtaatcccagcactgggggaggccaaggcaggcagatcacttgaggtcaggagtttgtgaccagcctgacaaacatggtgaaatcccatctctactaaaatagaaaaattagccgagcgtagtggtgggtgcctgtaatcccagctactcgggaagctgaggcatgagaatcgcttgaacccaggaggcagaggttatggcaagccgagattgtgtcacttcactccagcctgggcaatagagcgagactttgtctcaaaaaataaaataaaatgaataataaaagtaaattaaattaaaaatgaaaataataaaagtaaattaaatttaaaaataaaacaaaatataaaataaaataaaaatgatggagcatcagagacgcttgggtcccaatctcctctgccacaatctagctctgtgccctattctttttttttttttttttttttttttgagacagaatctcgctctgttgcccaggctggagtgtagtggtgcaatcttggctcactgcaagctctgcctcccgggttcacgccattctcctgcctcagcctcccgagtagctgggactacaggcgcccacgaccacgcccggctaatgtttttgtatttttagtagagacagggtttcaccatgttagccaggatggtcttgatctcgtgacctcgtgacccgcccatctcggcctcccaaagtgctgggattacaggcttgagccaccgcgtccagccactctgtgccctattcttaacctcaatttactcaccccaaaaacaaagctgtgagagaaaggaatttctactattgttgttgttattgttcttataactacaatcctgatcttttccaaagccaagatatttccctctcttttaccagaagtgtgttccctttaattccccagcaaggaaattttacagggtttggagaacagggtggccgttgctgggctctgtgctcactgggctgctctttcccatgctggccgttggcatctgcctcccgcgctgtctcatgctgtgctctctttctgtgtctgcatttgaaagtgatcatcagctagcctgtgtcttcgtcatcgatagtacaggccggtgaactgcgcaaagcattttctgcatttggagggtccatctctatccttggaaatgctagtgcttttctcacattcgacttctcttctgtgaacactctcaagcctctggggcattgtgggctgtcattttgtttggcctttctcagcttgacttcttggcaaaaattaggctgtgtatatctgggactatttgttgcccaggacaagattaactactcaagggatggctgaggctcacagagcatgagccctgcacagaagaggtaacatttcaccagccaggtgaactgtacggaaattaacaattgagtgtatgaatacatacaacattgagtatagatcgtgattatgataggatttaaagaaagatggcttcttggagatggtgtgctttggtggttttctgtttgtttgtttttgttttttgagacatggtcttgctctgttgcccaggctggaatgcagtggcacgatcagagctcactgcagcctcaacctgctgggctcaagcgatcctcctgcctcagcctcccaagtagctgggactacaagcacatgtcatcacacctggctaattaagaaaattttttttgtagagatgaggtctcactatgttgtccaggctggtctccaactcctgggctcaaacgatcctcccacctcaacctcccaaagtgctaagattgaaagtgtgagtcatcgtgcttggaccttggtgggtttttctttttttggagacaaggtcttgctatgcttctctggcctcaggggacccttctgccttagactccctggtagctgggactacaggtacacaccaatgcatctggctcttggtggatttttgaagtactcaaataggagtcctttaaagttgcaatgggaaggctcttaagggtcagggggagaaagaggaagactctgaagctgaagaggaggaagggatgggaagtggacacctgtgctggtatgtggataagttaggaaccggagggggcagtatccccccatctcattgcatggcctgtaatagatgatctttaaatgttgatgcaaaagaagaaagggaaatgctcattgtggcaacaggagagggctcacttaattctgaaatgtaagaaaaattacttgtgtcccagtctgctcttggctctgagggcttaaaaaaaatgaaaaaaggctgggcgtggtggctcatgcctgtaatcccagcactttgggaggctgaggcaggtggatcacttgaggtcaggagtttgagactagactggccaagatggtgaaaccccgtctctactaaaaatacaaaaattagccaggcatggtggtgggcgcctctcatcccagctacttgggaggctgaggcaggagaattgcttgaacccaggaggtggaggttgcagtgagcgcactactgaactttagcctggtcaacagagcaagactccatctcaaaaaaaaaaagaaagaaagaaaaagaaaaaaaagaaaaaagcaggacaacttaactgattcgaataaaataaaattagggccaggcatgatggctcacacctacaatctcagcactttgggaggctgaggcaggtggatcatttgaggttaggagttcaagaccagtctggccaacagggtgaaaccctgtctctactaaaaatacaaaaattatctgggtgtgatggcgtgtgcctgtaatcccagctaatcgggaggctgaggcaggagaattgcttgaactcgggagacggaggttgcagtgagctgagatcacaccactgcactccagcctgggtgacagagcgagactttgactcaaaaaacaaaacaaaacaaataaattaatgaaataacaaaagcagaaaacgagcatagggccaggcctggtggctcatgcctgtaatcccagcatgaaagtacatcaataggaaatgtatgtcagtgttgtggaacaacatctcaaaaacccttggaggatgttatggactgaatatgagaccaaggcaagaggatcgtttgagaccaggagttgaagaccagcctggacaacatagtatgaccccatctctacaaattttttttttttaattagcggggcctggtggcatgcgcctgtagtcccagctactcaggaggctgagacaggaggatcgcttgagcctaggaggtcaaggctgcagtgagccataattgcaccactgcactgcaagctggataacagagcaagaccctgtttcaaaaaaaaaaaaaaattggcaggcttcagttggaaagtcttggcctcagtgcccttgaagggcaggagtagtgcttctgccttgtgaatgccttctgaccccaccaatggggagaggtggacacgagagctgggcagatggaaatcagttgtatctttatcaatggtgacagctggatgtgaccacctgcaggctccctgacacctgctcctccttcctttacctctgttgcagcccaccctccaacccctaccacatacactgccatgctggatagtgcctgccgggtgagcttactcaggaaggagtggggactcagccaaggatcccatgaacaagcaaagcacagacaccctgaggggtgtgcagcctcaacaagtcctaacccacactcaagacaaattagatgagggacctcagagatgggtgactcctcccagagctccagaaagggtggaagtgcctatccttggcccagaaggtaattttgagaattgagagcttgagtgtgaaaggttgtaaaaatcaggccgggcacagtggctcacacctgtaatcccagcacgtgggaggccgatgtcaggcagatcacctgaggttgggagtttgagaccagcctggccaatatggtgcaatctactaaaaatacaaaaattagtcaggctgtggtgatgtgcgcctgtaatcccagctactcaggaggctgaggcaggagaatcccttgaacccgggaggcagaggttgcagtgagctgagatcacgccactgcactccagcctgggtgacagagcaagactctgtctcaaaaaaaaaaaaaaaaagtttgtggaattcagaatagcatttctcagaaagccccgctactgcttgcaaacctttttttctaatgaccgtgcacaggtttcactgtcacaggtttaattaaagtcttctgcttgatctcaagtagcgtggagaaaaaattcctcaaaagtgttgccattcagagatattttcaagggactttattagaaggaccatcatttaaggatgagatggtatgacagagggtgactctgctacaccagggaagaacatgctagggaaaacaccttctttcttttaagtcaagtgttttctgtgtcatcagattgcccaatcatccctggcatctctgcttctcaaccataggctatgatgtgtatggtgctcccatgagttgtgcagtacacgacctgcacaaccatatgtggcagtcctgcctaccctcaatggaagcaggatggagatgttcccctgggtaaacgtggcatatgtccctcactataagcaaaaaatcagagcaagtgtgaagtcagaagtccacccagagagagaggcagagttgcaggacagggatggaattccagttctggtgtttgttgtcttggaggcccagcttgacctctgcccttcccttcgcttgattatataagttttccaataatgtattttatttttaaagcgtaagttaggtttctatcaccaacacattctatctaaaagcccaagtcttttccttaacttgtcctaaatggccagttattaagaaattccattgagggtttggctgttgcatacagccttgtgggcattttgcttatccacgttgactttctcatctgggacactggcctacgtagtacgtgattccagcaaacagggcagtatgttgagctcttgaaataagtatgttgtgacagcctttgttacagcattaaaagaacagtctactctcaatggctgaccctttatttgtatgctgacgtcaaaaacaaaacaagactgcagacacactcttgccaatgctagaaaggatgcatgtttgaagtggatttttttctatttttttgcttggagaggagggtgtgtggacaccaagctggccatggtccaagctgacctatttgccagccgacccctgtctgggctgccataacaaagtgccatcatgaactgggtggcttataaacaacagaaatttatttctcacagttctggaggctaaaagtccaagatcaaaggcaccagtagatttggtaaactaggaagcggtgagggcccacttcctggtttatagactgatggctgtcttctcactgtgtcctcaaatggaagctgatgtttcacaaatattttctgggtaaatggatgggtgagtgaactcatgaagggatgctccattagatgaacgcttggataaagggcgttagtggagggacagaattgcagctccgtcctcccagggggcgctgcaggcacgtctgcttgggcaggggcccggcggaagcgccgctctaggctgcagccgcgcccccagccgtatttccgcgggcgctgagcactagagagagcgtcttgtggctgcggcctgcccctcagcctcctccgcgcggttacccctgtacccgccgccatccgtcctggcgctccggatgagtcaatgaggggcagggcccgaggagtggtcttcccaagaacccctggtggcctcccaaggccggtgctgtgtacctcctccccgacaaaaggggaaactgaggccccgaggggagtgggaagagccggctggacgtcaggcccagccgctggtgcagtggtccgtcccctctgccggggtgggcccctcgggtttcgcgtgtcctcgggaaagagactggcgggtgagccgcgccctcggccttcgctgggctaagccgaccccatgcagacgtcaaacccccctaggtcggcacagcctctctgcggggaggcttagtgcccccttgagaaacggcttggcaacgctgtgcccggggccttgcacgcgggctgagggggctagagacctcgcgacttttactcccccgaccccgatctccgactcctgactttggaagcccccaaagctgcttttcggttgcctacaaagtgtcggtcattgtgccacgtccttggaaccgtgaactcattttctcctcaataacctttaaaaagtagctgtaaaacctccattttacagaccagttggctgaggtttaaatggaggacgctcccagggccccagaggggcgaattccagactcctttgccaggaccttgtactaagccccttccctacgcttttccctgcctaggcctcgtgggctgtgcggctatcctggagacagatgacagctctcccttggatggctttgctggttccgcaccagccagcgcccccatttttcctgcagcaccctgatctgcactccctgaggggctcccactgtccgcggtgtgaggatgtccctgggtaagtggtgctggtcatgagcactttgggggacccttcaaattcccttctgggggaccccagcggagggcatggtcatgaattccgagaactgtatggcaaagccgggtgcagaggagagcctggctaagttctttcattctcctgagcttgactttctgtaatgtagggaaactgcgaaagctctgtaagtggggagatcttgcacgtttttcttgcttttgaacccatgatgtctggctacttgtagatactcaatatttgtgggatgaatgaacaatttaagccttttttttttttaaccagaaattggtcttctgtgactttcttgatgggggcagatgagatctttgtactgcattaagtggatagcgctcaggtcctttgggcttggcgctttggcaatctccaggcagctcactttggcctctgttcctggatcccctttgctcttttctgcgcctgcattcgtaagtgatcacgggctgcccgtgtcctggtcattggtagtgcaggcagaggaaatgcgggaaaggttgctgtgtttggagggtccacatcttcaccctcctgtcccaggagctttcctacactcctccttctcaaagctgcacacacctggggcctccaggggattgggggctgccgtgtgtgttatatcatgattagagctttcacttcctgctccctgctgttgggaaccaggctgtgtgtgttgcttaaattccccttgatgaccagcagagtcactgccactcagccatggcacactgctgtaaacctggttttgatctcctttcaatcttttgctgattaactacacattgatcagtgttggccaccctcaccctgccatagaccatccgctgtcttcctctgtagagttaactattttctcttttatgaggaaatagtgtgtttgcttaggagtgtttactgtctggtaactactgtgctaagccctttcctgttgcctgccatccctgctgcgagcagggacaagctgggtgctcactcatggcatcttatctgttgcagatagtccactgtgtgcagaggcatgggagttgtcatgttgggaacatgctagacctcagtatccttgaggtaagatctctggttcattctctggaatgttggttccttgtatctagtacagttctgtacatgttcccaggggctttggggttggtgtaggggagctgagaggtgagatgagaatggcactgtgggtccccagatccgctgtccacccagccaacccagatcacctctggcctttcctgtgccttccgggcttgctgctggggggaaacctccagagtcccactttggtaataagaggtctctgccctttctccctgggcagcaggatgttgtaatggaaaatgagtggacctaggcttcagagactctggtcccctggctttgaatccccttctgccactatcccagtcaaggactgattcagaacctaattttcttcatttggaaaataatgttctgatagaggtgacttttgtggtacttgagaccatatgattcctatcattaccaaccaatattttccgattgtttttgccccatgtgacttctctgtgattcctcctggcaaggaagttttacaggaaagcagggccacttttgggatcctgtgctgggctggatcattttcctggactggacctagtccacaagctgctggcatctgtttctcctcatggatctctctctgcccttgtatacacctgcattcaaaaatgatcacgggctgcctgtgctctggtcatcaataacgcagggagaggaattgctgaaagccgtttcccgtgtttggagggttcacacctgtccctttcaaatgctggcgctttcacacactccttctctcctgccagcaccttctggtctcaggagcattgcaggatgttgtgtgagtgagtgatgggagacactttagtatggcttttttcagcttagcctcctgttatcagagagcagtctctttcagtgtcaaggtttgagtactagatggtggagaaagcctgtgtgaattatttttaatgaataagtgtgatgatgggtggcatacagtcactgccttaagattttcaaagagaagcagccttttggaggtggtgggcctgggcaggtctttcaaggagtgggatgtgatgggcagtagaaaggtattccagggaggggtagcaacatgagaaggtctttcaaggattgggatgtgatgggcagtagaaaggtattccagggaggggtagcagcatgagaaggtctttgagtctgggatgagcaagagtgtctagtcccaccagggagacagatgtgtaggcaagtaatgacagcatggagggatggctgctggggtgatccttggctcccagcacggcgaggtggacatctatgggaggggccctgagaggtctcttgagctgtctttctgccagttgcacatctgctcagttgcctgttaagactcttaagacagttttgctggactcttaagtttttattttgatattctttgggagcattgagattcctttttgagatgagtttggtatgaaagaaactggcaactcatacctgattgattaactgggggcattcccattgacatcagcttgaagaaagacgacagaacactggagaccaagtacttacagccttctgctctgtggcccctcctcactccagggatgctgccttgggtctggaaactgttagaggaaaccccaagaggtgcaggcactgagcctctcaggacaatgacctggggtcccagctcccctggaggggcctcctcatggtaagtgaatgccaagaggttaagttggcctgtgtttccgaggtggaaattccaggtcgctggcttcatttgtcttctcttttagattgtttgggggttgatcacagaccaagagtgacgagtgatgtcaccctgtgactcatggctggaccttcttgcccctattgtctcagcacaacattattcgacttttccctcagcgtgggtgggcagaggaaaagccctgtggctctggggacttgggatccagagttgaagacccttcagctggctctgccctgccagtgccacagagtgccatggcccaggaagacaggttttcttccatctaggccaggccatccagtggccatcctccgtgtcctcccgcctcctcctggtgtgacttctgaaaaccaagaatttgttcctgttgactttttctgtgctatggaccattgtcctctcacccactcaataaatcttgaaacatgccctgctgcttgttctttcatttttgtgtgtttggtttttttttaatcagtatctccgtgtgccagcaagactgggtgtagagagtgggtcacaagggcaggtcttctggttctcactcattaagactttccccttgacacatacccaaggcttgacctagggaatgtgagatgggacgtgggatttggaccggggttgaacaataatcccaagtgcatctaggggtgggggggttcaggcttaggagagaaggggaactcttaggattaagttggcaggggaaacatttgagccaaggctttgggagagaagactatgacgggataacttagggatggaggcaggggctggagtccttgaagaatgcaagagtgccctgagctcaggtggtggattgcaggtgaatgtaggagttggttttgagcagaggagagagtggagtatatgaggaatagctgcacttggagagctctgggggtgtggcaggcagtgccagccgctggggcttctgttaccatgagatagatttggtctttggggattctctttggtagcagtgatcgcagtgatgtgcttacgtgtgcattgtatgtgtgtcaccacctccatatgttgctctgtcctcatttttcaggtaaatttcacacaagaatgctcccaaaggctatggtagaaagttgggagtcagttggtcccactccttcagttgaaatagaaatcactgtgactaagccgggcatggtggctcacgcctgtaatcccagcactttgggagtctgaggcgggtgaatcacttgaggtcaggagttcgagaccagcctggccaacatggtgaaaccccatctctactaaaaatacaaaaattaggcatggtggcaggcacctatattcccagctactcaggaggctgacgcaggagaatcatttgaacccgggaggtggaggttgcagtgagccaagattacgccactgcactccagcctaggcaacagagtgagactctgtctcaaaagaaaaaaaaaaaaaaagaaataactgtgactagggttgagggaaaccaggctgtcaggcatctctgatgacctctgccagcaggagacattcttggctgaagagtccgctctgccagccatctctggcgagggccttatttctgcattgcccccctccttattcctacccaagaaccacctgacacctctggtttgctctcttgaagatccccccacctgctgcaacccctctctagccggttttatccaactgtggcctttgtcctttagtgagaaatgaccacatttcccccaccaaagaaagggggccaaaattctccccttttctgagtccactatttttagtgaagttttacactggttggtgccttgaattggtagacctgtctttccttagcaaactgacccctctcatagctaagcaggttcctgtcagctaataggacaagtgtctacactacactcccttctttaatctctcgttctctttctctctctctcatgctcttcttgacccactacctcaatcctgcaacctgggggtcccttacgccctttttagtttgttctatgggaggcaacaatgatggagtactgaaaaacaagggaagaggtgagattgccacgcagtgggggaagagagtgtcagctatagagataggatcacttactgtggcttggccccctggcataaaagttttcttactaagccagactggttgatttgtggagggttccctcatttatcaccctattttcatgcatcctagtggttgctggctggatgtgaaggttggtgaactaatatgttagaagctcttagcatagcacttggcacataggaagtgctcgatgaaggatagctcctctcaatcactagaacttcctttccaattgtaaatggtcctcatcgctggcccagcctcttaggtctttcttctcctgccctctgccaccctcgcccgaccctaccctcagcctctagcctagacttcccattctcccgaggagacagcaaggccctcctcactctgcctgtggcctgcctgtccacccttttctcacacaagcaccctaggcctcagccacccttctgcttaaggtccctgaacatgttcttttcccggcctatgcgcctggaatgcatcctccgcttcaagctcagctgactcagcttgtgtcactttcttcaggaagcctttgctggcggaacctccacccagactggattccccgcccctccttccattcatatcaattatcagttctgtgcaggcacaattctaggaactggtaaacaaaacaggcaaaagagcaaatccctgctttgtacttacattttggaggacaaggacatatcataaaacaaagtactaaaataggtagaatgcttgagaaatgttaaggaaaaaaagtcataaagcagggaaacaagataggaagtttggggaccagcagagggagtggcattttaaattgagtagacacgacggcctccccaggaaggtgagatttgactaaagtgaggagctctcactgctgggcgttcactgcaggctgtttaagccgccatcactgcatggaccatggacaataggaagctttttcctggccgagcgtggtggctcacgcttgtaatcccagcactttgggaggctaaggcgggcggatcacgaggtcaggagatcgagaccatcctagctaacacggtgaaaccccatctctactaaaaatacaaaaaattagctgggcgtggtggtgggcgcctgtagtcccagctactcaggaggctgaggcgggagaatggcgtgaacccgggaggcggagcttgcagtgagccgagatcgccccactgcactccagcctgggcaacagagcgagactctgtctcaaaaaaaaaaaaaaaggaagcttttcctttggataccaggttcagtgaagtggggagacaacaggcatctgaggccactgcagtgctgcttctgattatgaacgtttcaccatgttgtgaaggtgcagctgaatcaagccaggattaactggtcagcacctggatgggtgtgtctagaggccaagctctgcacctgtcagctccccatccccctcacctccaaccatagctcagtggtctagggaagctcagtcacccaaggacagccttgataggcctaacccatcaccttggtccaggacccatagcagtgatcactgagccctgcagtgtttctgctgggagagttctgcatgtcaagagactgagtaattggttgcagaaacaggaagagacagagtaattaagtcttaacagcagcctaggagcatagaacattgagctcctgttgcaagtttctagaactcacaggtggagaatgaaatttcagtttccaaaccacgttcgtgctcctccaggcatgactgtgagcagtattctgatttgccatgaggcctggggattcagttttttctgaatttttataaggcatggctatgtgaccaagattccttttcgtttttttaaaaaattttttagtttattttttgagacagtcttgctctgtcacctaggctggagtgcagtggtgtgatcttggctcactgcaacctttgcctcctaggttcaagtgattcttctgcctcagcctcccgagtagctgggattacaggtgtgcaccaccacacccagctaatttttgtaattttagtagagacgaggtttctactaaacccccgtcacgttggccaggctggtctcaaactcctgacttcaagtgattctcctgcctcggcctcccaaagtgttgggatgacaggcgtgagtcaccatgcccagcctgtttttaattatttatttattttaagacagggttttactctgtcgcccagtctggagtgcagtggtgcaatctggactcactacagcttcaacttcttgggctcaagcaatcctcctgcctcagcctcatgagtaactggtactacaggtgtgcgccatcaggctgggctagtttttgtatttttttgtagagatggggttttacattgtttccctggctggtctcgaaatcctggtctcaagtgatcctcccaaattggcctcccaaagtggtggtgttacaggcatgagccaccacacatggcctctttttttttttttttttttttgagagcccttacattcactacttccattactaaagggagcaaaatgaatcttttctcattatagtcaaaaagcataccaacataatgcctgacgggtggaaggtgctcagtcaacatttagggatgaggaatgataccagcagatgccttgatagtgtgcgccagaaatgactcatgcaggcccctctgcctctgtgggtacgactgataataggtgggcctggtgaagtcactaagaatctgatgtggctgggcaaggtggctcgtacttggaatcccagctacccaggaggctgaggtggaaggatcacttgagtccaggagtttgagaccaacctgggcaatacagtgagaccctgtctcaaacaaacaaacaaaaacacacgaaaacctgatgctgtcacttaattgctatggggcctggagcacattattttgcctccctgaccctcagcttctggctgtctaatttgaccatcaacatagcacttaccccaaatagcaatgatgaagatgatgcatgttaaatgcgtaacatagtaactgccttgcacggagtgcttgataaatgtctgctgtttttatttgatgagcacatatagcttgttgatagttaaaatgaagaacaaatataaaatgtcattatgacaggctcatctgctaaggcaccacaaatactttcttctttcttgtttgctaatttgcagacatcccagcggggttggtgttagtcactgctaccattgattgaaattctgttaagtcccacgcactgtattaagcctgtatgtataattacctcacttaatcttcacaacaacccagtgaggtagatttaattattttccattttacaaataaggaaaccaaggctcaaagaaatggaagagacctgtctcacacctaatgagtggctcagctagttttccatttcctgctgtattaaatagtgaaaaatgtttcaggctgactgatttcataaatagcataagcataccaagcttatcagatgcttgtttgtactggaatactggaaattaggatattttactatttgttccatctgcttcaaattattgcctattatttagagttgctgaaatagtcttcatctaaatcagtggttttgcagattgaacttatgaacctgacatgtacagggacaatagccatgttttagccaacaccaaaatatcaagtgtccttcccactactgttgtgtctgaagcaagagtcatccaagacccacagaacttgaggaaacttgagaagggtatcaccaatgtggcccaataaccaggattagcatcaagaagagccacgatcctaccaggaaactgttgcctggcaccagagtccctgtgacacagtgggtgggagattccacggcagaattgagccaggagaatgaagaactggacagaatgaaggttcatttgtccatccaaaagatatttattaggcactgtgctgggaatagagataccatgatgaacaagaaagttgttgccctcaagaggatcgcataaacgtgtatagatgataagttatatgaattcacactccagatacttatggaacaatcactatgtgctgggccttgctctcagatgggcatttgggtctgaacaaagcaaatgaaggagtttatagtataggacaatgctgtccagttaaaaaaataatgtgagccacatatataaaatttcatagtaacctcattaaataaaaagcaggtgaaataaattttggtaatatttatatattttatttagcccattacatcaaagaatgttgttatttcaacacgtaattaatattaaaaattatcattattattattttgagacagagtctcgctctgtcacccaggctggagtgcagtggtgtgatcttggctcactgcaacctctgcctcctgggttcaagtgatccttccacctcagtttcccaagtagctggtattacaggcatgtgccaccttaccctaatttctgtatttttagtagagatggggttttgccatgtttgccaggcgggtctcgaactcctggcctcaaatgatccacccgccttggcctcccaaagtgctgagactacaggcatgagctaccttgcccagccaatattaaaagttattaataagatttttccccaaatgaaatctttgaaatctggtatatattttatacatacagcacatctcagtttagactagccacatttagagtgctcagtagccacatatggcgagtagctatcttactggacatcatagatttagacaataaggggttcaaggatgcctcctttacaggaaggctgctgcatcttgtgggggcttaatgaagctgctccagcttggatcccccattctctggtatcccctctcctccatcttggcagagcagggcgaggtatatatcaggcatgcctgatggaatcctgcctcatgttccagagccttctggaggcaagacaccgagtcctgggtgtgcttctctaacacagatcctactggagttaactttagtgtacccagcgtttgttattcagtcagtcactacctgtttactaagtgctggcctctgtgctaagcactgtgaatgcacgccagtgaaaacagacatttgttagctcataatttcatcaagataaacaagatgcataaattgttaaaaactctgagaaattctacagaggaagagggaaaggtgctgcaagagtaaatagggcacctgacctcttgggagtcagggaagtagacttaactgagcaaaggaggagagtggtccacatccaaaagctgcgtggaggatgcagggaggagctcaacggtggttggtgtggctggcatgcagcccggagtggtgtgagcactggctttggagtcacagatctggtccaacttaactgggtgactttgatgacaagttttaaactctgtgcgcctcagtgacctcctatagagggatgtggtgaagattaaacagattgatgtttgtttttttaagacggagtcttgctctgttacccaggctggattgcagtggtgcaatctccactcactgcaacctccacttcccgggttcaagctattctcctgcctcagcctcccgagtagctgagattacaggcgtgcaccaccacacctggctaatttttgtatttttagtagagacggggtttcgccatgtttcaccagagtggtctcaaactcccgaactcgtgatccgctagtcttggcctcccaaagtgctgagattacaggcatgagccaccacgccctgccatgagcagctattttttttttacataaaacttttattttggaataacttcagatttacagaaaaatttaaaacctggtacatagagttcccatatgcccttcacccagcttcccctaatattagcatcttatgtaaccatgacacatttgtcaaaattaaggaattaacactgatacattaccattaactgaaccacagactctatctggatttcgccagttttcccattgatgtccattttctctgccatgcagaatagcacattacatttagttatgtatccttaatctcctccatctggaatggtttctcagtcttcctttgtttttcatgaccttgacagttttaaagtgttggtaagatattttgtagaatgtctctcaatttggatttttctttttctttttcttttttttgagatggagtcttgctctgttgcccagactggtgtgcagtggcacaatctcagttcactgcagcctccatttctcaggttcaaacgatactcatgctttagcctgccgagtagctgagactacaggtgcgtgccaccatgcccggctaatttttgtattttgttttgtttttttgagatggagtctccctctgtcatgcagactggagtgcagtggcgggatctcagctcactgcagcctctgcctcctgagttccagtgattctcctgtctcagccccctgggtagctgggattacagacgtgcgccaccatacctggctaatttttgtatttttggtaaagatgggccttcacatgttggccaggttggtcttgaactcctgacctcaggtgatccacccgcctcggcctcccaagtgctaagactgcaggtgtgagccacctcacccggcctaatttttgtatttttaatagagacggggtttcaccatgttggccaggctggtctcatactcctggcctcagggatcttcccaccttggccttccaaagtgctgggattacaggcatgagccactacacccggccctcaatttaggtgttcctaacattttctcatgattagactggaggctacgggtttctgggaagaatactccagaggtgaaatgcccttctcatcacatcatatggggggtacattatatcaatgtgactcatgatcagtgacattaaccttgatcacttggttaaggtggtgactgccagacttctttgctgtgaaattcttatttttcccttttcgtaccgtaatatttggaacataggtttgattttaatagatattttaaaaatatatatttagaaatctttacccacactgagagaatgtatatatttttctcaagcacctttggggtatgtattaatattgtttgcatatttacaatatttacaaatatcatctacagcatagaatgtggtaactttgatgctgcaaagcaagtctcaaatattaataccagcacatcagtatcaggaataaatgggctgggcgtggtggctcacgcctttaatgccagcactttgggaggctgagtcgggtggatcacctgaggtcaggagtttgagaccagcctggccaacatggtaaaaccctgtctctactaaaattataaaaatcttccaggcatggtggcgcgtgcctgtagtcccagctcctcaggaggctgaggcgggagaatcacttgaacccgggagatgaaggttgcagtaagctgagatcttgccactgcactctagcctgggcaacagagcaagactctatctcaaaaaaaaaaaaaaaaaaaaggaaagatgacgactgcaatatgtcactacaatgtaaagtctaaataaaaacaaaacaaatgttaaaaatactcagacctgaagggtaatgaaaatactgtattatcaaaacttgtatgatgtatagctaaaacagtacataggagaaatttatagcctcaaatgctttcattgggaaagaacttcccaccagtaagggagtgtgtgactcattacacaggttagacggaagttcagagagttctccctggtgtctttggcatttctccaggatttttgcagcactccgagggaatcagagccccagtaactactgagattgaatgagccactagtgcagtacaatgcagacacagaacagattatattttattccacaaagaaaaggaatgagatcttttcccaccttacctttgtgaaatatgttccatttccattggaggtgctgaaggaaatcaggttttaagtcatgttttatttagatctgctagagagactgtgttttgtttttctttttttttttttttaattgatcattcttgggtgtttctcgcagagggggatttggcagggtcataggacaatagtggagggaaggtcagcagataaacaagtgaacaaaggtctctggttttcctaggcagagtgtttgtgtccctgggtacttgagattagggagtggtgatgactcttaaccagcatgctgccttcaagcatctgtttaacaaagcacatcttgcaccgcccttaatccatttaaccctgagtggacacagcacatgtttcagagagcacagggttgggggtaaggtcatagatcaacaggatcccaaggcagaagaatttttcttagtacagaacaaaatgaaaagtctcccatgtctacttctttctacacagacacagcaaccatccgatttctcaatcttttccccacctttcccccttttctattccacaaaaccgccattgtcatcatggcccgttctcaatgagctgttgggtacacctcccagacggggtggtggccgggcagaggggctcctcacttcccagtaggggcggccgggcagaggtgcccctcacctcccggacggggcggctggccgggcagggggctgaccccccacctctctcccagacggggcggctggccgggcggggggctgacccccccacctccctcccagacggggcggctcgcctggcggggggctgacccccccacctccctcccggacggggcggggagctgacccccccacctccctcccggacggggcggctggccgggcggggggctgacccccccacctccctcccggacggggcggctggccgggcggggggctgactcccccacctccctcccggacggggcggctggccgggcagaggggctcctcacttcccagtaggggcggccgggcagaggcgcccctctcctcccagacggggcggctggccgggcggggggctgaccccccacctccctcccggactgggcagctggcctggcgggggctgacccccacctccctcccggacagggtggctgccgggcggagacgctcctcccttcccagacggggtggcagcagggcggaggggctcctcacttctcagacggggcggttgccaggcggagggtctcctcacttctcagacagggcagccgggcagagacgctcctcacctcccggacagggtcgcggccgggccgaggcgctcctcacatcccagacggggcagcggggcagaggtgctccccacatctcagacgatgggtggccgggcagagacactcctcacttcctagatgggatggcggccgggaagaggcgctcctcacttcctaggtgtgatggcggccgggcagagacgctcctcactttccagactgggcagccaggcagaggggctcctcacatcccagacgatgggcggccaggcagagacactcctcacttcccagacggggtagcggccaggcagaggctgcaatctcggcactttggggggccaaggcaggcggctgggaagtggaggttgtagcgagccgagatcacgccactgcactccagcctgggcaccattgagcactgagttaacgagactccgtctgcaatcccggcacctcgggaggccgaggctggcggatcactcgcggttaggagctggagaccagcccggccaacacagcgaaaccccgtctccaccaaaaaaatacgaaaaccacgcaggcgtggcggcgcgcgcctgcaatcgcaggcactcggcaggctgaggcaggagaatcaggcagggaggttgcagtgagccgagatggcagcagtacagtccagcttcggcttggcatcagagggagaccgtggaaagagagggagagggagaccgtggggagaggggagagggagagggagaccgtggaaagaggggagagggagagggagagggagaccgtggaaagaggggagagggagaggggagctttttttttttctttctttggttggctgattttgagacagagtctcctctgtcgccgaggctggagtgctgtggtgcaatcacaactcactgcagcctcaacctccactcagcaatcctcccgcttcagcctcccaagtagctgggatcacaggcacatgccaccatgcccagccaagggtttcaccatgttacctaggctgatcttgaattcctgggctcaagtgttagactcacttcggcctcccaaagtgttgggattacaggcgtgagccactgcacccagcctgttttgtttggggcaagggttttaacatttatatatatataaatatatatatattttatatatacaaatatatatataaatatatatttatatatatttatatataatatattatatataaatatatttatatataatatattatatataaatatattatatataaaatattatatataaatatatatatttatatatataaatatatataaatatatatatatataaaaataccagcacatcagtatcaggaataaatgggctgggcagtatatatatatatatatatgtatatatatatactgtttttcatatatatatactgtcttatatatatatatactgttttacatatatatactgtttcatatatataatgttttatatatatactgttatatatattatatgtactgttatatattttttatatatatactgttatatatattttttatatatactgttatatattatatatatactgttatatatatattttacatatatactgttatatatatattttatatatatatactgttatatatatatattttatatatgtatactgttatatatttatattttttatatgtatactgttatatatatattatatgtatactgttatatatatattttatatgtatactgttatatatatatatttcatatatatatactgttatatatattttatatatatatactgtcatatatatattttatatatatactgtcatatatatattttatatatatatactgtcatatatatattttatatatatatatactgtcatatatatattttatatatatatactgtcatatatattttatatatatactgtcatatatatattttatatatatactgtcatatatatattttatatatatactgtcatatatatattttatatatatactgtcatatatatattttatatatatatactgtcatatatatattttatatatatatactgtcatatatatattttatatatatactgtcatatgtatattttatatatatactgtcatatgtatattttatatatatactgttatatgtatattttatatatatatactgttatatatatatttttatatatatactgttatatatatttttttatatatatactgttatatatatttttatatatatactgttatatatatattttatatatatactgttatatatatattttatatatactgttatatagatactgttatatatatactgatatatatactgttatatatatactgatatatatatactgttatatatatactgttatatatatatactgttacatatacatatatatactgttatatatatactgttatatatattgttatatatatacacatatatatatacatatatatatacatatatatatacatatatatatacatatatatatacacgtatatatatacatatatatatacacatatatatatatacacacacatatatatatatatatatactggctgtgtgtggtggtgcacacctgtaatcccagcactttgggaggccaaggcaggctgatggcttgagctcaggagttcaagaccagctaagcaacatactgagatcccatctctaaaaaaaatacaaaaaggccaggcacagtggctcacacctgtaatcccagcactttgggaggctgaggtgggcagatcacgaggtcagcagttcgagaccagcctggccagcatggtgaaaccccatctctactaaaaatacaaaacattagccggacatggtggcacacacctgtaattccagctactcaggaagctgaggcaggagaatagcttgaacccaggaggcgaaagtttcagtcagccaaaatcacaccactgcactccagcctgggcaacagagcaagactctgtctccaaaaaaaaaaaaaaaaaaaaaaagccgggcattgtggtgcctatacctgtatttgcagctacttgggaggctgaggtgggaggattgcttgagcccgggaggttcagattgcagtgagccaagactgcaccgctgcactccagtctgggtgacagagtgaaaccctgtctcaaaaaagaaaaaatactgtccctgccaaatccaagacagacagcttttctttttcttttcttttcttttttttttttctttgagagagagtctcgctctgtcgcccaggctggagtgcagtggtgtgacctcagctcactgcaacctctacctccctggttcaagtgattctcatgcctcagcctcccgagtagctgggattacagccagttgccaccatgcccaactaatttttgtatttttagtagagacggggtttcaccatgttggccaggctggtctcaaactcctggcctcaagcgatctgcctgcctcggcctcccaaagtgctgggattacaggcgtgagccaccgtgcctgggtcagacagcttttctatagtgaaacaaatcacacaggaatataattatgaccattttccctggcaaatatctaagtaactttaaggtttgtcgggtcctgtgtcataggtgttgccatgtgtgctacctttttcagaaggccccatttaccttgtaaacctctcttcatctctaataggccctgtatgggctctgctgtctcagttttaactgtcttctgcttgatgtgagttcagcctggggatataaagctttgcagagccaatgcctttgcattattccctgaaagcttgactagggaggccaatcattatgggccagggtgggattccttgaactctcttggaatgggctcaccaaggactatctttggttctaggaaaacctatcattttctttcctttaaattaagcgttttcagtggcattggctcagccaagcatccctagcatttctacttctcaaccataggtgagtggtgctcccatgagttgtgcagtacacaacctgcacagccatatgtggcagttgtgcaggggtggcagttctgcctaccctcagtggaagatggatggagatttgttctaaggtaaacctgggatgcattcctcacatatgcaagaaagctgagtgagtgtaaaattagaagtccatagatggagagaggcagagaaacaggacggggagtctcaatggaattccagttcctggtgttgtcttgcaagtctgacttgatctctgccctccccctcatttgattatgtaagctttccaatcaatattactctttatttatttctttttagcataagttaggtttctgtcaccaacacattctggctaaaagcctgagtcttttccttatcttgccccaaatggccagttattgtggaattccactgggttttggctgttggatgaggcactgcgggtattttgcttatccaggttgactttcccatctgtgacactggcctacctaatgagggattccagcaaacaggatggcatgctgagctctcaaaataaacatgtatggcagcctttgcacacagtattcagaaaacaatccattatcagtggcttgccgttattttttggtccctaaatgtattttctggcattaaaaataaaacagcaggtatgctccctccaagaaggagaagtgtgtgtgtaaattgggccttttctactggagggggtgttctggggtacaagtgagggcccagtgagggctcaggctgacaatcaggactacttggaaaatagtgttctcaagagtggaggaagtgggctcaaaggagcttgaggagactatagggggaagcgcaggacaccagccaaggcagtcctggagtgtgcaaggcccaggaccaagatttttggcgtggcccctgtctctttctgttctagtccaggaaccatctcttcatcttttttctgtttgtttatttaatgtaaaatgtgccattcctgcttactcttatattctcatcacaaaaaatggtacattgtttggaacctgttactattgaagatcttgcttttgcagttccctaatacatttatttaatgctggatatatcattatgtacgatgctatatcatctatgggtggctgacttgttctcaaagatagttactgtgccttactgatgagaactacaaatataaatgttgccaagagtatgcaggaaaatgtgcatgataatttattttctggtcatgttaaatttaccactgggaatttttttcttcaatgtaggacaacgcctcttacaactgtatcttgacctcttgaggcccaaatcgctgcattcctataatgtggttgctttcaatgatgactgcacccctgccttccacatgccaccattagcagggagcacagcaagaggcctgtgagcagagtgagaagagcaagctcatttaagcaggatacttccatctcttattctccatggcttaaaaccggtgagagaataatgtctcaactggaggtgtgaaagtacatcaataggaggtgtatgttggtgttggggagcaacatctcaaaaatccttggtggatgttatggactgaatatgtgttccccccacctcccggccccaaattcatatgccgaagccctaacctccaatgtgatggtattaggaggtggagctttgggaggtaattaggtttagataaggtcgtgagggtggaacccccatgataggtttgtttgtttgtttgtttgtttgtttatttatttgagatggagtcttgctacctctatcgcccaggctggagtgtagtggcacaatctccgctcactgcaacctccgcctcccaggttcaagcgattctcctgtctcagcctcccgagtagctgggattacaggcatgcgcccccatgcctggctaatttttgttttgtttttttgttttttgagacagagtctcgctctgtcgcccaggctggagtgcagtagcgcgatctcggctcactgcaagctccgcctcctgggttcacgtcattctcctgccccagcctcccgagtagcttggactacaggcatccaccaccacgcccagctaatttttttgtattttttaatagagatggggtttcactgtgtcagccaggatggtctccatctcctgatctcgtcatccgcccgcctcggcctcccaaagtgctgggattacaagtgtgagccaccgctcccggcctaatttttgtatttttaatagagacagggttttgcctgttggccaggctggtctcggactcctgacctcaaatgatctgcccgcctgggcctcccaaagtactgggattacaggcgtgagccactgtgcccagccgggtttaatgcctttataaaaagcagaagagacaccaaagcttcctctctccaacatgtgaggacatagcaagaaggcaagtggggaagagggccctcaccaggaaccaaataggccagcaccttgatcttggacctcccagcctccagagctgtgggaaataaacatctgttgtttagactgtggtacccaggctgtagtattttgttatagcaacctgagcagactaagacagaggacataggcatggccaatcctggaggacagactgacagctgatccggagtctgccaaagtggtgaggtgactgccctggagtcagctggggaaggggtgcacaggtaaaggatgcctgccacacgtatccccctccccaagatcaccctggctgcaataagccagaggtggtactctggtctgaagacagaggtataagccaaggcatatatccactcaggcagctcaagcacaagcatttgcagagcccagatccttgaactcgtgctgtgtccaagtgagtgaaagcatgtcagcagcatttctgacagcctaatctcatataatctagtgaaagaaattctacaccaggcagcaggagtgagctgcttgcaaggctgctctcagaaccagatctggccatgacgactccataaacatgaattctggagcttctcagggcatctggttgaccctacatatgtgtgagagatgggtaggggtaagagagagggttggagagcaccctgaagaggagaaacagcaaatgggacccacagggaaaggacttggtctggagctcggttgccctacctagatggcaccactcaccctagctagtcccagccactggagagagacttagaaaatttcaaggtagaaaattgtggtcaacaagagtcacatgggatctggtctagacagagacacccttcctaaatggcattgctagccccagaagggcacttacaaacttttgaggaatacagtccaaagtgcaggaccctcttaaggcacagagtctggcacaaggggcctcacttgcctgaatctaatggtgttactaccatcaaccactggatactatccactaagaattaacagtaggagcaagaaggtgggttcagcactgagccaatgaagtttctatccgtcccctcatccatccatccatccatccatccatccatccatccatccatccaacacatgttcattgagcacttaacaccatgccagtattgttttaggttcaggaaaacagcaatgggtctgaccaactatttctaccccaagctggtactgcacaattaaaaaagaaggaaaaataaaacaagaaaaaaatggccacagacgtatctcacatacagctgttcatttacaaacttttctcaattatggttcttgaaaagtgttccaattactgcgactgtatacaatttaacccaaaacttagtggttggggtaaatgacaatgtttattttactcatgaatctgctatatggactgctcaatatttttcatggatccacatctcttatgggctgctctcaatagggttagtttgtccctgctcagcttggtgtcaggttggggtggaggcttgaagcctgggggctggaatcatctgaaggcttcctcactcatatgtctggctattgatgctgactgtcaccagaaacttagctagggctggtagctggaacacctcttcatgttttccttatgtggcttgggcttcctcccaacatggtggctggggtcccagagtgagcattgtgatagggagcaagccaggtagaagctgtgtcttctttatgacctagccccagaaatcacatagcatcacttttgccctattggttagaatggtcacagacgcagccagactcaaggagaaggaacatcaatcccacttctcagtgggaggagtgtcggttacatcataaggagaaccatgggatggatcatatagattggtatggcatctcccagaatgatgctttcagggtaaataaaacaaaaaagactggtgtagtgatctttggaaaaaagtctgtcacaaaagcttataccgctgctcctcttttttccaattctgtgcctttccaaacacactatacacaatgatattttgacattacagttcagatgaagacattccccagtttagtcgatgtttctagttagagatcatgccgtggaacaaatttgaattgtgcactatgtttggagatccaaaatgttttactatgtgtagcatctcatgtgtctcttaagtttattgtacatgtgtgcttttctcaaatgtttcaaagtgttctaatgtttagtctttaattttccctcaaggtatatgtgcgtatgtgtgttttatttttatgtttgtttaagtgaagacttcaaaagttttaaaaaattagcaaagagtgcagaaaaaacatatcttttatgccaggcacagtgatgtgtgcctttagttccagctacttgggaggctgaggcaggtggatcgcttgggcctgggagtttgaagccagcctgggcaacatagcgaggccctgtgtcttaaaaaaacaaaccatcatttagagaaccactcacttgcatctctcctccaccaacttgcacctaatattaaatcttgtctttctgtccagagcagtaagtcttactgccttacatgttatgtaaaaaccatattttaagcaaaattatttgtttgtataattttctgttgcatcaatatattttttctgttaaaaatatttaggtgccttaggctggaattgaacacaattttgcccattttaattaatgggaaaaatttaacagctttccacttagaagcagaatttcaggaatgaattgaaaccactagaagggtgatagctgtattttcatcatctccccaagggctttgggacagctttcccatcctctgtgcctgtcacttttccaattcccatcacccgttgttcttccagttagtcacccctcccttgtctgttacaggggttcagtattaattgtgttagaatgcatctggttgcaagtaacataaaactcaacaaactctggtatatataagatccctcatcccgataagacaggaaggtagtacagggtttgtgtagctgcttgagtatgacttaaacaaacaggctcctgtctttctgctccaccttcctcagcacagccctcctcatggcctctaggctgctgtgctcccaggtgttacccagttccaagcatgaagcaggggaaaagtgaaggacacaaacttctccaagggaagaaggaagggaaggtctcctttgatacttctgcctacatctcagtggccaggactttgtctcactgccacccttagcagcaaagaaagttgagagttgtgtgctttgcttttcagcccctgtagtatagaaaggcaagggagtggttgaaatagatcttgagttagccaactacataatttgtcacactgtgtttaattgaaatgtattgcttggatccagtgtcctggacatagcctcgttcctgtcctagcacattcttaccctccttttccctcttccttcctgtagctatttttctggggggtgaggtgtggtcttgaggaaacactcttcagttttaccctttctgtgaggatactagttcccttatcactcattcctccatagtctcttctaactgaggtgaggagtcagaatcttctttgctcccttctgcttttcagacaaccgtgccttcacctctactcaacaccctgacccctcctccctctctcaatacccaaggtcagtctcaaggccaggtcctccgtgaagaattccaccatccctccctcctcttctttctcagtccaagtttcctcctttagattctcaaagcacttaagctgtacctctccaatggtattattttcttcgttgaagtgaaagcaaattattgaaagtggtactgtttacaaaatgtctagcgcatggcaggtgctcgaagtagtatctcttagtattattactactgtcttatctcgatcagattcagctctttaatgagaggctctaaatcttatgttcgattcacctttgtaacccacaccgggcctggaatagagcactgttcataattaatgctgtgcccgtgtaataagacggcggcgagcaaagggcatcatttcagaggaagagtgctgtaatggtgggatgggagaaattcctagaacctaggtgggagccagaatcttgcagagaagccccttatccgtctgcaccgaaagcaggtagagtggatgccgtaagattcctaaggacgcaggtagagcgcctcctctgtgccgcgatgaggtaggtgcatccgtcacttcactcctccctctccacttgatccggaatgggaggaacgcaatgcgtcccgcgcggcgatctgggatagctgcgcaggcgcagcttccggctctgtgtctcgggaattatttgacgccaccggttcagccccgtagaaagctctgattaggcgcaccgcgcacgcgcagtggcccacttggctggggagttatttgacgccgccgcccctggcagtcggaagttgcctgagcagatcccagccggctggctcgagtggccttcgtcgtcccttggcgccctgggagagtcgctgacgggtggactgacggaccgcctgaggacggccggccagggcggtgaaagcgccagccctatggcgcgggtcgcgtgaggcggaaggccgaggacggccggcggcggcgcccgccccggcgatgcgggccccgcccgtcgcctcaggtaaccgggcagccggccccgccgcggccggaccctcccctctccttccctctcttccccacctggcggtcaagggacggctgaggcttgtttctcggctctgggtgctccaggggcccggcctttggaagctcatctgcaaatttttgggagacccacgggggcggggaaagcttggccctggagtgggcggctgctgtcgagtctgtgtaaacccggtctaatccttgggagctaccccggccaggcgaagctctctcctggcaacctgggggagggggcgggtctggagcggagctagacaactcccgcaaagaatttggtccagcagaaaggttaggcaagttgctgccgcccagtggggacgatgctgcccattgcacagtgacactttgatgagggagagttgatgatgggagtaaacagctaacccccattaagcgcttcttatccgccaggcatcatgccaggccattacgttctccacgtctaacttcacagcaaccctgtgaggtaggattgttgtccccattttactgacgaggcaactgagtccctgggtggttgggtgacttaattacccaaggtcacatagctagtaatttgaaccggagcatccgacccaagtgcttaacaattagggcagtggctctccaactttgctacactgtagaatcacctgggggaaattgtaaaggtttctgatgcccatgtggcatcccagaccaaaacaatcagaatgtctggagttgaaagccagacttcaatattttttttttaaagatgcccaagtgattccagcttgcagcaaagtttgggaaccgcatgtaatttgataattctgcatctcaaaaagcatctctctttctccagcttaagtgtgcaggagaattgtctgggagcttgttaaacttgcaggttccacccgcagagatctttaggttgactgaccactacaccttgtgaaagactgttagggatggaattctctgcagggattctgagtcatctggaacatttaaaatgtatgcatcttatgcaaactgctcgtttgcaattttcctaaatatacagtacttataggtgtagcgtctgtaacctctgggtcgtttttacatatgctggaagtctgcctagaccatcctctgaacgttctggccatcccacccaaacgcacacacttctgctctctcctatatgcatatacacacccttttcttttctttctttcttttttttagacagagtcttgctctgttgcccaggctggaatgcagtggcatgatcttggctcactgcaacttccgcctcctgagctcaagcagtcctcccacctcagcctctcaagtagctgggactaccacgcttggctaatttttgaattttttttgtagagatggggtttctccatgttgcccaggctggtctcaaactcctgggctgaagcagtccacccactatggtctgccatagtggtgggattacagatgcgagccactgtgccaggcctacatacccttttcttcctgtctctggctgcattagctttaagcattcccttcaagatacctctgtccctgacccctacccaccttgagtccttccaatttgctctttaggaacatcgtagtgaaacttatcagttatttttctgagttgtagttctatccctacttctagattatgagaagctttagggcagggactatgttttcttcatctctgtattccttccagtgctttgacatacagactcacaaagcttttactcagtggaatgtttgggtccttttatgtcatagatagatcatgttgcgaacagattcttctctatttccatttttgtaaaagatgtttggtagttcccagcttatagagttttgttctttttgcttaggagtgagtattctagttatgttcagcaatttgtccagcagttgaacacacacattgagttcttaccaattgcaaggcactctgtaactaaccatgtgcaatcaacattgtttgatttttaatgtctgattctatcacaatcggacgcaatcatgtctgtagggaaagtctttttattactgttagacctttgcatgtgttccctacttcattgtccaaaaaagtgtttagttgtcatccactaaatgccactgccttgttggtatttggtaaatacaagcagatgggattgccattggtaatgtttggtcctgttcaccaggagagaggacgttaagtacttaatgaagagtaaaatcatgttgtcacaggaattgacaaatttagcacatatttattgcagaatgcctgaactgccattgccccatttgccatatttacaagtttaaaggaaggcagaccaataattcagattggatttgttcttggttggtcttaaaaccatgtaaggatttgcaaaagttagtgaatatgtgtgtgaaggtcattatgaggaggtttttggacaataaagatttttttttgtatagcaattaaacatgacaaagtatgtagactgaattaaaaacacatttcataaaattttttttttcttttttttttttttgagatgcagtctcgctctgtcccccaggctggagtgtagtggcgcaatctcagctcactacaacctccgcctcctgggttcaaacgattctcctgcctcagcctcctgagtagctgggactacaggcacccaccaccacacctggctaatttttttgtatttttagttgagagggggtttcgccatgttggccaggttcatgtcgaactgctgaccttaagtgatctgcctgcctagtcctcccaaagtgctgggattacaggcattagccaccgtccccagcccataaaatattctttataaggattgttatagaaaaattttcttggttccgttttgtattatttggtcagtttttaggcttagcactaatagaaactgatgggacaacttatgttaaattcagatactcaagaaacttgtccttgtgtgtctgatcagatagggacacagtatccagttcttgctttagcacatggaagaaactcaatctttaaggctgaaggtttaagtctgtagttgtgccccaaagtaaaggtgaaaaattccacatgctcagagaacaaaagtgactctaatcatgatagcttgggacctagaaatggattctgtttaatacgaggtactcatcagtgttagcaggtgtgtttcctgacatgtgcaaagactttttgggcagaatagttgattttctttggtgcgagatgatttaagttttaaaattaaggtgcatggagtttcattctaactttttatagatgcggaaagtaacttggtcaaggctacatggttagcttctagcacctccaggactagaaagcaggcctccttcctctggacggtgtcccctttcgcccccgaccccttccccatgagaaaggttgtcttgtgtattgttgtgttgtgtttgcctgtctgtgtgtgcatgggatagggaaggggagagagtgatctgctatgtttgagaaactcaattagatatctagaggcccctcgacttatgatgggattacttcccaataaacctatcaaagttgagaagatcgtaagccaaaaatgcatttaatatacctactgaacagaatagcttagcctcatctaccttaaacatgctcagaacatttacattagcgtacagttgagcaaaattgtctagcacaaagcctattttataataaagtgttgaatatttcatgtaattgattgaatattgtactgaaagtgaaaaacaatggttatgtggataatcagagtacggtttttactgaacgcatatcactttcacaccctggtacagttgaaaataataagttgaggatagtgagtacttggtgtgtgaaatgcacttagctatataaactgggaatacaaagataaataagacacggcccctgtcctcaaggagtctaatcaaagttataataaaataatagtgtagtatctgaagcagctctgtcaaatagaattttctgcaatcatggaactaaatcttacttgctctaatatggtagccactggccacatgtgacttgtaagcatttaaaatgactagtgtaaccaaggaagtgatgtttgactcaaatagtttaaacttaaaactattaaaattaaaagtttttaaaatttaaatagttacatgaaatagctgctgtattggacagaggtctgttttatgcctcagagaaggtctcaggcataaaagatgagaactgtggtggtgctggtagggggcagacagggtattcaaacgttctttgggtagcttaccaaaaactaccattttccatgttttgggagagatgcaggcagaacctgtctttgtttcctgtaattcaggtgtttgataggatctctaatagcatctggtacataggtgaataccttccttttttgccagctttattgatgtttgccttatggggtcaatgggactgcaacagcaatatgaatcatgaggttatatggatgaatttggtgcaccttaaaaaaagcacagtttatttatttgctcagtgttttagcaccctgtatcctatttttcccaagagaaataggcatgtcttataatgtgtaccttccattggtacatttcaaagtatgtcaacttaggttgctttatttgatccttctcccaggtcactctagataggcactgcaggtattctccctgttttacagatgaggaaactatgacaaagaaatgccaggtcaccgagtgcggtggctgacttgtaaacctaacactttgggaggccgaggtgggaggattgcttgagcccaggagtttgaggccagcctgggcagcataatgagactttgtctctataaaaatttttctaaaaattagcggcgcatggtgacacacacctgtggtctgttacttgggaggctgagtgggaggattacttaagcctgggaggcagaggctgctgtgagccgagatcgtgccactgcactgtagcctgggcgacagagtgagaccttgtctcaaaaagagaaatgccagttgacttatccaaagtcatatggtgaggtatggagtcaggacaaagggaagtagcattgcactttgaggcaagaggtggagtttcttgtcccagatccgctgttacttgatgtgatcctgagcaagtcatagctttactttgtttccttacctagtggttagtgacgtctgtcttacctaaccttctagggttgttattggaataaaatgaagtaacatgtaaaagctctttgaaaatgataaattatgcaaaggtacaatgtgctcaagcaagacctcaagtagtttttctttttttttgagacggagtctcgctctgtcacccaggctagagtgcagtggcgtgatctcagctcactgcaaccttcgcctcccaggttcaagctattctcctgcctctgcctcctgagtagctgggattacaggcagccgccaccacacccggctaatttttttatttttattattatttattttattttattttttatttttgagacagagtttcgctcttgttgttcaggctggagtgcagtgacgccacctcggctcaccgcagcctccacctcctgggttcaagtgattctcctccctcagcctcctgagtagctgggattacagacatgcgccaccacgcccagctaattttgtatttttagtagagacggggtttctacatgttggtcaggctggtctcgaactcccgacctcaggtgatctgcctacctcggcctcccaaagtcctgggattacaggcatgagccactgcacccggccaatttttgtatttttagtagagatgaggctttgccatattggccaggttggtctcaaactcctgacctcaagtgatccacccgcctcggcctcccaaagtgctggggttacaggtgtgagccaccacatccagcctcaagtagtttgttttgttgtattatgctgctgtcgtaactcatcagttaccatattgaatactactgtaccatggtgtcatctttgatttctcttgtcttcctcactatgaaactttctcttgggcagccattgtgttttgtttatattaggatttgtcctaaatcctaggacaaatttgacatgtagctggtgtttaatgtttgtttaatgaaataactgatgtctggatgtactttacaaagttttaaagaattgttttttgtaatgagacttgaagctccttgggaacagggatgttgtttattttctgtgcttgttgcatagaaggcatgtaataaatattgtttgaatcaattgatgtaattaatgtcaggctatggtcttagagtgtccaccattgtattgattattttggtaatttgtcatttagaccaaacttgcatgttattttgcggtggtgcttacaagccataagctgttacccagcacacacaacctccagagagaatacctagaaaatgagtacatatagagttgggaaggaaattaagggatctgcaggggagcactgttgacttcttccccttcttcccattatatttacttctggagcattgaaggtagaggtttctctgctagcagctcaggttgatagcagacagccacctggggaggggactcaggatccctaatatagcagttgaagtccttaatcatctaacttgacagttatatcattatatctcactacagtgcctgaaacctccctgttacccccctgaccgccctcaaccttagcctatatggtagccacattggagtttgctcttctactatcccttcagtgtatcttggacacttccatcaaattgctttaatggaaatttagttcccgatgtgtcatgcctgtggtaaggttaaactttcttcttttttttttttgtttgagacagggtcttcttctgttgctcaggctggagtgcagtggtgcgattttggctcactgcatcctccacctcctgggttcaaacgattatcatgcctcaggttcccgaatagctgggattacaggtgtgtgccaccatgcccggctaagataaggttaaacttttgctcattttctgcctccagttttactgaattaattacaaatattcaatcctaacattcagagtccttcaaaattggtcactgcttacctttgaaaccttaccaccttctacatatagctttctttcctttggctctgggttttcggtttctagtgctttttttttttttgctacctgaagcaagtttcctttcttttatgtattttcttttctttctttctttttttttttttttttttgagatggagtctcgctctgtcacccaggctgtagtgcagtggcgtgatcttggctcattgcaacctccgcctcctgggttcaagcgattcctctgcttcagcctcctgagtagctgggattacaggcgcacgccaccatgccctgctagtttttgtatttttagtagagatggggtttcaccatgttggtcagcctggtcttgaactcctgacctcaggtgatttcacctgcgtcggcctcccaaagtgctgggattacaggcatgagccaccacacttggctcttctatgtattttgttctctcttttatctgtgactcccccacccccgccccccccttttttttttttgagacggagtctcgctctgtcacccaggctggagtgcagtggcgcaatcttggctcactgcaagctccgcctcccaggttcacaccgttctcctgcctcagcctcctgagtagctgggactacaggcgtgtgccaccacgcccggctaatttttttttgtatttttagtagagacggggtttcaccgtgttaggatggtcttgatctcctgacctcgtgatctgcccatcttggcctcccaaagtgctgggattacaggcgtgacccactgtacccggcctcatctgcccctttttaccctcagtcttatcacctcaattttcttacctccatcaaaattatacccttccttcaatgcacaattcgtatgctctgtatctgtagtctttcctgatcttaccctgttgttttccagctcagcctatctttcaatcaaaagtaatctttttcctttgaacttccgtggtgtcttgcctatagtttttaaaaatatcacattcaacattttaatgttctaacttatgttatagttatttatggtaggtattagtctgttttcatgctgctgataaagacatacccaagactgagcagtttacaaaagaaagaggtttaatggagaaatcctagttccacgtggctggggaagcctcacaatcatggcagaaggcaaggaagagcaagacacatcttatgtggatgacggcaggccaagagagaacttgtgcaggcaaactccggtttttaaaaagccatcagatctcgtgagattcattcgctgtcatgagaacagcgcagtgaagacttgcccccataattcagtcacctcccacagggttcctcccatgacatatgggaattgtgggagttacaattcaagatgagatttgagtggggacacagagccaaaccatatcaatgtatacatcttaatctccttaattaagccataaactcattgaaaacaggaaccaagtcctattaatctttcttcttcatggttttaacactgcattggacaaaatagatggttaatagctgtttattgaataagtctacttggtggtccccgccagtgtctctgaatgttcatatgtatagtcaggatgctgacatatacttaccaattctatgacataaagatgtagtaataaaaacatattacattaagttgtaccaacatttctaccactaagttaaaactacagttgactctcgtacatcataagggttaggagcactgaccctgtgcaatcaaaaattttcaagtaacttttgactctgccaaaactagtaatagtcttctgttgaccaggagcctggccaataacataaacagtcaaataatacatattttgtatatatattatatgctatattcttaaagtaagagaaaagaaaatgttattaagaattagaaggaagagaaaatgtatttactattcattaagtggtagtggatcataaaggtcttcatcctcatcatctgcatgttgagtaggctgaggagtaaggggaggcattagttttgctgtctcagggatggcagaaatggaagaaaatccatatgtaagtggaccttagcagttgaaacccatgttgttcaagggtcaactgtacttgcatttctctaccatccttctaatctttagtcacagctgtatgtttatctttttttttttttttttttgagacagagtcttgctgtgttgcccaggctggagtgcagtggcgccatctcggctcactgaaacctcaccctcccaggttcaagagattctactgcctcagcctcccaagtagctgggattacaggcacacaccactaagcccagctaatttttgtattttttagtaaagacagggtttcaccatgttggtcaggccggtctcgaactcctgacctcaggtgatccacccaccttggcttcccaaagtcctgggattacaggcgtgagccaccgcgtctggtgtatgtgtttatctggttgtaattatgatatatatgtttttctttctctaatagttatttattgattgcttacatggacaagggcatgtttcaaacggattacatatgtgattctttaatcaccaccacaagaaacacaatgtgtaggctcctaatctactatttgcttttttttagacagagtcccgctctgtagcccaggctggagtgagtgaagtggcacaatcatggctcactgtagccccaacaccaggatccaagtgatcctcccacttcagccttcagagtagctgggactacaggtgtgtgccaccacgcctggctaacttttttgtgttttttgtagagttgggttttctccatgttgcctaggctagtctcaaagtcttggactcaagcaatgtgcccgcctccgcctcccatggtgctgggattataggcgtgagccaccatacctggccttattctattattatccccattttacagatgaggatgttccaacacaaaagtagagtaacttttgcaacgttacccagcttgcaggtagagctgggatttgaatctatgaagcctagttccagagcactggctcttaaccactctcatctatgtttttatgcttctctgtaatctcagtgtttaatggctacataatagtatatagaattaatatgtcctaattatgaaattttcccattattgatggaagttaaattacacccacttccccatcttatatgtaatactacagtgagcatcttgtacatttttaaaaattgagctgttttataaggataaacaagtcaaattaccgggtcaaggcaccctttgtcttctgctttgtactggcaaaacgttcatgctatccttgggtgaatgtttaggaaatgacatatcagcctgaggtgccttacaagtgtgccaacttactaacgggatggagctacaaacaaccccatggcaagtagactaagacatggcaagtgtgatcaagacatgtgagggttctgccatggtgctatcctgagaggttgattcttgcctaggagggcctaggtggtgcagcagtactggctcctgaaagtaacgttctccaggatctccaaggtttgttgctttggatagcctaagccgcaacagcaagaggaggttcttatttgtgtgtttaagagtaggctgggcaggcgcagtggctcatgcctgtaatcccagcactttgggaggccgaggtgggtggatcacaaggtcaggagttcgagaccagcctggccaatatggtgaatactaaaaatacaaaaattagccaggtgtggtggtgggcgcctgtagtcccagctactcaggagtctgaggcaggagaattgcttgaacccaggaggcgaggtcacagtgagccaagatggcgctattgcactccagcctgggtgacagagtgagactccatctcaaaaaaaagaaaagaaaagagtagactggccactgacaatactgggcctaatggaactccctctaccaaatctgtcactgcactttgccttcatcccttttttccctaacagcaaccacgatgaaataaagtgaagttgtaggacctccatagttgggttataagcccagccccagcaacaaaggtgggttggggtgacttctggggcaccaacagcttatacaaagtatacacttcactatcctctttccacaaggattttgctataattcagttaccaaaactagtatatgcctttatctgtgatcagaggcataaattggaccatagataagttcttttttagctgacattgtgtttttttgtttttgtttttgttttattttgttttgagtttagttgataacatttaaagagtaggagactgtagaaatgtccagattttctgtgtctcttcaaaaattggattatctggcaagtctaggtctgcattccttctaggtgacagctagaactgtgtaatagctgtaaacagagcttgtatactagctcttgttgcccaggctggagtgcaatggcgcgatctcggctcacagcaacctctgtcttccaggttcaggtgatcctcctgcctcagcctcctgagtagctgggattacaggcatgcaccaccatgcctggctaattttgtatttttagtagagttggggtttttccatgttggtcaggctagtctccaactcccaacctcaggtgatccacccgccttggactcccaaagtgctgggattacaggtgtgagccaccaccacacctgcctggtgatgtgatttttctagagttgtgaacagttcttggttctaaagataatgaagcttagtcttcctcaatttatatgattaattgcattattggaaaattcagtctattaaaatagcacaatatattttgtatttatatgtaaatgaagttaatttttaggctcagacaatggttttctagcagatgttcaaaagtcatgtgagatgtggcataattgttcattgtgcaggactgtctcatgcagtacaggatgtctagatttcctgactctgcctgtaataccagcagcttgccctactcattgtgctaaccaaaagtacacttatttccacagtgcctctaggtgacaggtttttctattaaaaatcattgccctaatctctcagttgggtccttacctcctcatcagagttgagttttttgtttttttgttttttctttttttgagatggagtcttgctcttgtcacccaggctggagtgcagtggtgcgatctcagcttactgcaacctctgccgcctgggttcaagcctctcctgcctcagcctcctgagtagttgggaattacaggtgcccgccaccacacccggctaatttttgtacttttagtagagacggggttttgccctgttggccatgctggtctcaaactcctgacctcaggtgatctgcccgcctcggcctcccaaagtactgggattacaggtgtgagccagagttgagttttatcgcttgttttgttagtttaataggtacaaaatgatactttagttgcctttgtgttttttccatgtttgtttctaatgtttatgttctcttcattgttttacttaatatatccgtaattataatgcatttctttgttttaatgttttttgtctgcattttgttaaagtttagcatcttttttctgttacatatattttgatgttttagttcagctttttcattgtatcctttctatatcttttttttttttttttttttgagatggagttttgcttttgtcgcccaggctggggtgcaatggcaccatctctgctcactgcagcctccacctcccggtttcacgtgattttcctgcctcagcctcccaggtagctggagttacaggtgtgtgacaccatgcccagctaatttttgtatttttagtagagacagggtttcaccatgatgttgtccaggctggtctcgaactcctgacctcaggtgatccacccacctcagtctcccaaagtgctgggattacaggtatgagtcaccacgcctggcctatatctttctattttacatgtttcttgaaagcattttttggtttcatttaatcatttaaacattaatacatttagagaatgaaaatttcttacatttaaaaacttaaaaaaagtttgtcagaaggatttaatagctattaaacctattttgattggtctttcataaggtatactcctctcttcagaattgggagggtagtggccatttcttaaaaatgcagattctcaggccccagctcagacctgcagaattgagctttttctgaatggggtctaggagtctgcattttcagctagaccctttcctcccctgatgattcttaagtgtacagtagagtttgagagctagtttgtccttttttttcttcttaaaatctgttttcttccaataatatgctgtgatggatcctgaatattaaatattcatttagtatttggaaaccatccaacttttatttttactagtaattagcttcaaacaagtgaacatttttaaatttttatttgaatataacatacaaaattttggacacactttagtggaatagagggaataccttctgatatcttcctttttcccactggtaaaccttgacactctcaaacacatggtcaatgtccactgtgtgctagggactcagaggttcaggaggcaaggtccccacccaaaaaaggctgacacttttgtggtgaatgtatccgtacaccactaatgaatgagctaatggcagctttatatgaacatccggtaataggcactcagctgagaggagttggtctaaggagtcaagaaaggttttaccaaagagaggacatttgagttgggctttgaaggctgagtacttcataagatggatcaaggcagggaatggcagttcagtcagtgggagcagcatgaccagtgacttagggtaagaaaggatttgctgggcttgagcaatcatcagtagttctttgtggccattgcttgggatgtttgtgggaaagtggcagtagaagatgaggctggcaaggtagtgtatgcaattcccattagaattgtagcaaggctttattgttgatttttttttatttggataaaataataaatcgtatactgaagaataaatgtctagagaagacaataaagttttggaaaaaacattctataaagccactgaacttaaatcattatgggttggcatgggaatagacaagtagttgagtagaacagaagtttcatagattctagaagaaatgaaaatttaatatatgacagaattagtatttcagtttagtgcgaaaaggatgtatttttaagaggtgatgctgacacaactgaccatacatttagaagaaagtaaaatcagacctttcctacaccacttacagaagtaaattccagatgaatatacaagttaagtgaaaaattatgcaattatcttgcaggaaaatctaggagactacatattcacattagggttatgttttcaaatttttggactaagacctatcataacaaatgtattttccgctgggcacggtggctcacacctgtaatcccagcactttgggaggctgaggcgggtggatcacctgaggtcgggagttcgagaccagcctgaccaatgtagagaaaccctgcctctactaaaaatacaaaattagtcgggcatggtggtgcatgcctgtaatcccagctactcaggacgctgaggcaggagaattgcttgaatcgcggaggttgctgtgagccaagatcacaccattgtactccagcctgggcaacaagagcaaaacttcgtctcaaaaaagaaaaaaaatgtattttccattgtgacccagaacatatgcatatattacaaaggaaacaagtttcacagaaacattgcttgcctttattatgtgtgatgcctttatcatacatcctataccatctaattaaaacaagtattatccataacatttatttcatgacccatagtttgaaaaacattgatagtttcatgacccacagtttgaaaaacattgatagaggcaagatgtttgcagcattctttatcatgccaatagtctatacatctgttttatttatttctgttaatttccaatagtataatttgacatgcatttctgttttgtcttttcaggtgccatttggattgtactttagtggcacgatgtactctgagtggaggtcactgcatttggtgattcagaatgatcaaggccataccagtgtgctgcacagctatccagagagcgttggacgagaggtggcaaatgctgtagtccgtcctcttgggcaggtgttaggtaccccttcagtggctggtagtgagaatttgttaaaaactgacaaagaagtaagtgtttctaaatttcattctcttatatgaaaatgtacatttgttcttgaagaatttgtttaatgttaacttttttgttcttttttctttgaaaagagctgtagtagaataacgtcaactttttaatggatttctccccaacgtagtatgacttctcaattttgatcttgtttgagttgagggctgggactcggagtttgtggaggttataaggagtgagttgtactgttttgctgctgggactttttactagttatggtcaattctccacttgagctgaaggccaagacaaagacttgaatgtcaaacacttcccccaaagatctaggcttagtcttctgatttccatttagagtgtgtttggaaggcctcatccctacctctggatggcccctgactgaagactcatgtcaagttttcaggctatgtgtatgctgtgcttaagctctcccctgtccccatccctacctactccttcctggcttccaggtttaagagtgctgcagagaagccaagcccttctggcctaagcctaggtgattggaattggggttgtgtttgctgtttctttttttttgacagagttttgctttgtcactcatgctggtgtgcagtggcaccacggctcactgcagcctcagtctctctgggctcaaatgattcttccaccccagtgagtccccagtagctggaactacagacacatgccaccacgccaggctaatttaaaaaatttttttatagagatgatgttcttactatgttgcccaggttgggtgtttactgtttctaaagataggggctcttggaatggcttgccctgaagctggccctttgttcttgggttcagcggcccaggctgaagttaaaaagttgccattgggaagtcatgaaggggccctgagaatggagtgatagaggagcttgctagtataaattctggctaagatgcaggattaaaactttgtcccttgtgttgaagaagctcatgcaaccttcagacttcatgtttagcaaaacctgtaccctatttctcagaccctttttttctgtttgctttttggtttcctgtgaaggagagattagacttagatataagactaaaacttgtagctctaagggtaggatcctccttcagccatgggtctctgaagagtaaaggtcttcagtctgaggaacatttttctctcttcagaggaccctagatttatccccgaggactagcacaggccctagtgtttctcttcctggtgcgtttgtgatcccttgttgccttctcctgggaagagatggtacgtgagtagatagaggtgctctgatgcagcccttttttttctcctttctcaccattgaaaagagatgagaattcctgtttcctctggaattatacttttttttttttttttgagacggagtctcgctctgtcgcccaggctggagtgcagtggcatgacctcggctcactgcaacttctgcctcccgggttcaagcgattcttctgcctcagcctcctgagtagctgggactacaggcacatgccaccatacctggctaatttttgtattttaaaaatgtatttttatttatttattaattattatttttgagacggagtctcgctctgttgcccaggctggagtgcagtggcatgatcttggctcactgcaagctccacttcccgggttcacaccattctcctgcctcagcctctcgagtagctgggactacaggcacccaccaccatgcctggctaattttttgtatttttagtagggacagagtttcaccgtgttagccaggatggtctcaatctcctgacctcgtgatctgcccgcctcggcctcccaaagtgctggtattacaggcgtgagccaccgcgcccggcctatttatttattttttgagacagagtctcgctcttgttggccaggctggagtgcaatgtcgcaatcttagctcaccgcaacctctgcctcccaggttcaagcgattctactgcctcagccacccgagtagctgggattacaggcatgcaccaccatgcctggctaattttgtattttttttagtagagacaagggtttctctgtgttggccaggctggtctcgaactcctgacctcaggtgatccacccaccttggcctcccaaagtgctgggattacaggtgtgagccactgcacccggccaatttttgtatttttggcagagatggggttttgccatgttggccaggctggtctcgaactcctgatctcagatgatccacagtccttggcctcccaaagtgctgggattacggttgtgggccactacgcctggcctagaattataaaattaaacaactgtgtgaagatgccaccaaagatatcttcttggtttttcatctgataattagggacctgcaatgtcttttagaatctcttctcttatgtggctaaatcttgctacaccctgctccaaatttgtcacagcttcactgtgctgttataggcttctttaacacttactgcagttaaaccatgtatttcctacccttaacctttgtagttgcttttgagcttaacaaatttaatacatatatttatcttgttagatttaactttggttttaagctgttgaagcctttttgaatcctgaatttctgtccaacaagttggccatcctttttagctttgtggtatctacagatgatcagcatacactgtttttctttttttttttcccctaagttagaatcttggcagagcctttggcatgccactgagcacctttttccaaaatgatcttggcatgttaatctactgttactctgtcatgtgatgtcttgaccagttgtaaatctagccattctaccatcctctgggccatatgtctccatcttgtccacaaggagatcctgggtctgtctagatttcttgctaacacccagatacccgtttgccggagaactctgttaatggtatggagagaatagcttaaaatttctagttggaagaccagggttcaagttttcagctccaccttttataaaccagtgacttatgccaaattgcttaatcttgctaagcttctgttttcttatgtgtacagtaaggatagtttaccctgtctacacagagttattgtgatggctagatgatatttatgaaagtgctttgtaaactgcaaggactacactgttgtcagccctctaaatagtaaccctattaataaaggaatgaagctcatttggcatggcttgatcttattgagcaggctgggtcttggtgatcatgcttctcttttgtgagtgttcactgattgcttagtaatttgtctcaaagttttgtctggaattcacttaaactttccagtttacaatgtctggaatacagtttcctcccttttttgcaaattggggtttctcatagatggagacatatagctcagatgatggtagaatggctggatttataattggtcaagataccacatgacagaatagtattagactaatgtgccaaagtcattttggaaaaagttgcccagtggcaccttctagttggaagaccagaattcaagttttcagctccactttttataaaccagtgacttgggccagattatttaatctctacaattacgactgccggcagcctagtggttcagccgtctcttaggcaagttctctcagtccttaggatgtgattcagctaggtcaggaggctgggactcattcagtgcagctaaatgccttgttaagatcttacccagcttcaatcctttttcagatgtgtttgttcttcattttaagtattattattatttttttttttggcagagaacagttgtaaagtaagagtaaacagttgatctttcttcctgttgtttgtgcatttgcataatctggagatggaatgtgactgactttatatgattttctaaatgctacacatacttaaacattaagtggagaaaaaactctaaaatgttctattttgcatatctaatctctatggaaatttgaaatgacctgtatttactttttagttcacagagcaaataataataatatctaaagggtaaaaaccagcataggcttgatattcaaaaataagtaatttattttcttcttaaagcttttgcttgggaaattgtatgtttgatatgtgaaaaatgcattatctaaaataaatctgatatttacgttgagacgaatatactgtcaatttagaggtttttggcaataaaagagattgacattttaaatcagtctactgagataggaacgtgtaataattctatatggatattttcttttgtctaggtaaaatggaccatggaagtaatttgctatggactgacccttccattggatggagagactgtaaaatattgcgttgatgtatatacagactggattatggctttagtgttgccaaaagattctattccattgccagttattaaagagcctaatcaatatgttcaaactatactaaaacacctacagaatctttttgtaccaaggtaagctatacctgtctatctggcccattatcagggtcatagtaaaatattcataaacgttactatagtataggagctgatttcattgttagtcctctgaacagtgacttcatgtgttcagttaaagattgtattaatgtgaatgttaggagagatgggcttatgtaatgtttactaggagtttttaacaggtatgtgttctttaaaggtttttagctttgcttctaaaatctcatacctgttagatattaaaatactgtaacatctttcccttctactcaaaaaaatatacttttgcctatcacaattcttgtttccatttaggctaaacacaactaagggagatgcatctaccttaataggcatctttcctatgagagagtgaagacacttgaaatgattatgggcaaattgttagtaagccaaaagattcctcttgatagtttgtttctgatttttttttccatcttaggcaagggccttaaatatcataatatagggataccttcaaggagcagtagaacatgtttccttttggtaaagttctggttagagcttttggtctgtcatacggtgagggactttgaaaaccagctctgtaagtttttaactttctaaatatagaagggagattactttggaaaatctgaattaaaaaagagaagtctccagaactctggtctgtaggctcaggtgtaaacagcataccatgcatgaaatgcctggtgtagtctggcccctaactagactagctgttctgaattctgcgtgagtgctgctctgtagtcagactcgtaagtcagacattcctctaagacctcctaaagatctttcccatcatgatgtctttttgtcttcttcctcttccttctctccatcaccacatctcattcttgttggttctttaattctgccttgtgaggagaagtcctacctaaccactcaggcccacagcgatcacaccttctctgaacctatatgatactttctgcatcactcttgtatctctcactgttttattgcttatcttttaaaatgtgtgtctcctttccccatctaaccaactcaaaggcaggaactctgttgtctctattttaggcttccacagtatctggtgcaatactggtattttaatacttagtacttatcttaggtgtcaattaaatgcgtgttgtttgtatttattgatttcacatggaattaaaaacaggaaatgggccgggtgcagtggctcacgcctgtaatcccagcatgtttggaggctgaggcgggtggatcacctgaggtcaggagttccagaccagcctggccaacatggcgaaaccctgtctctactaaaaatacaaaacttagccgggtgtggcggcatgtgcttataatcccagctacatgggaggccgaggcaggagaatcgcttgaatctgggaggcggaggttgcagtgagccgagattgcaccactgcactcagcctgggtgacagagcgagactctgtctcaaacaaaacaaaacaaaacaaaaaaaacaggaaacggttgggagtacttagaatattgtttataagcaggttcttctaaaatggtgtaatagttttaatactttcttgttatcttatttaggagcctactaggctttttcttcgtgcctgggatagtctcatgagtagtattgtcactgtgtctctttcctctttgtaagcctactacctttcagtgctcagttaatttgtattgatgaaaaaaaattaatggcatttgagttaattaggcttgtgcctttacttttctcttttgagaaacatgactaccttataaatggttttgctatttggtaattaccttgttttctcaaaagtatgtgtgcataagtgttagtaaattctgagagggtactcaactgagaattagagttctcttcctggctaatgttttaggaaaattagctgaatattttcaatggtaagtattggtgttatgatctcatctcccattatttgaagttttagttgtttatttgattctgatagttcacaaaactgtcatctaagtttacttaattagttgtttttataaaaactgacattcaaaatggagggaactgcctttgccattttgctagagattatgtcagaatgaatgtaacatttctcttttgcccatcagtttgatttttttttttaagattgagtgaagagtaaatcatcttttaaagttggttaaggttttaattgctcacatatactatactgtactttagaaaaacatattattgttctgaagcagggttagcaaagagtcagatagcattttaggctttgcaggtcatatagtgttataattagtcagttctgctggtgtggcatgaaagcagccatagacaatatataaatgaatgatcattactgtgttccaatacaacttcatttacaatatagatagtaggccagatttgtaaactctatttacaataaaagatggcaggccaggtttgacccattggccagcattcaccaccactgttctaaagcagtttttctgaaaatcacaagttacattttaaaaagtaacttgatatttttgaaagggaaatctctggtgtttagctcttctgtttttttttaatgtaaaggttaccttgtttcttttagctttagaactttggaccctgcctctgaatttaggccttctgaatgaggaggaaggagcctcagtacctgaggaacaggtatttcctttcctgtcattgggcaaatacctggaaatggtaggtagacctaagttaccatgtaggaggcatgcactcttggaagggtgtcagtcccagggccattagtggtatttttatttcttattctgggcttcctcttatattacttgattaggtttggggctatgctatagttttttattcttcttcaagtaagccagagcaatagacacaagcttgagccttagggctttacatggactagatccacctttactagatccacctttagctgaatgtggaacatctccccgctcctggaggtgcttggctcttcctaggcaattttctcatcattttgctttaggtctgacttctttagggaaaacttagtggtgtcatttgcttgcaactctagggtaagtgtcgttttctgcatcatagcccagaatctgagaatctctcttctaaggttgggttgacagttctaagggaactcacttcattttctggaatttcttgaggaaactccccagtctgattcaggtatgtttctatcagttctttgtgacaaatgacaatatgtagaaacttggcctcaagacttttttcagtaatattagatacttctcttgggtttcccataagagatctggaggccagcttaccacttgctaatacaatgggtttcctactattctcaaaattctcagtggtctactttggaaagtgagggtaagggctgggacctggacctctatcttcatcttcagtcctagccaaaatactttgatctgttttatagatcattcttctttataagatttcccttggaaaaaatggtcctgcggtgagttttaaaactgttgttccggggtatcctgggaaacttggagcctccatctttggctaagtgtctttttctaaaattagagcagcagtagcaggtatttatttctgaagcaatgcctgcatacctcattaattttggggacctattaggctattccttctggcttgtaggcccttctctaacagaccttagcttcagagggactatgagcactgtaaaatcacatgcagaattcttgcaaatatgtgtttaaaaaaattaaaaaagaataccaaggccattctgcttcaatgtgagcagcaagggtggcggtgggtatttacttgttcattcaacaaaaacctattgagtgtctgctattatgtgttaggcacatgttagacatagaaaatccagaagtgaagtttatgttctagtattcccgccttcctcccagaagctttcgagttctcataggagtggtaggtttagattccagagtgcttaactttacgacgagtaagaagtagctttaaactgaagacggtatgcctagccctctctgctgataatattagggagcttcattggaccactgcttgctacatccataagtcacctgtcctgaagctgttgctgtctctcctccaggcttgtcagtgatatctgtctgtcttcttcagacaggaacagggttccagtcagattcgactatgcttacaggtcctgagagccattcagaaactggcccgtgagtcatctctcatggcccgagaaacttgggaagtcttactgttgtttcttctgcagattaacgacatacttctggccccaccaactgttcaaggtttgtttatttttttttttctaatttatttctgagctccaaatacagttcatctttaaactcagtgagcggtagactcattggggatttaaattttggcatgatggtttacaaacaaaggttaacagttcttagaatggaaactctcaggcacaatataactttagccctgatgaagttattttaccttcagtcatgattttgctaatgtagggagggactcagtgaattatgcatgtttgatagtgatgggagcagtagcttgtttaataggataggccaggcgtagtggctataattccagcactttgggaggccaaggcaggtgtatcacctgaggtcaggagttcaagaccagcctggccaacatggcgaaaccccatctcttctaaaagtagaaaaattagccaggcgtggtggcacacacctataattccagctactcaggaggctgaggcaggagaattgcttgaacctgggaggtggaggttgtagtgagccaagatcgtgccactgctctccagcctgggcgacaagagcaagactctgtctcaaaaaaaaaaaaaaaagaaaagaaacaattaaccaattaaattagagcctatagataatatattacaaagtagttatcaaagtagagtctgaaaacttggtagtgacaagatattttactcagcaaatgaaacctccaaagtcttttaactgttctatttggaagtgtgccagtttgctattcattagctagccattaaatgcctccagttttataagactttacagtgtatttcagaatccctgctttgtatatagcacagtgtatataaactataagttgatcatctagttccaagttctcttgttgcttattcattggtgtactctgttgactaacacatgtgagtgtgcttgtgttctcacacagatgcagtattcagggaaatatctaaaaggaagcatggaatttcagtgtgggaagggatgcaatgatagtaatactctgtctggtattgacaatagctggacagtcattgattcatcacctctctgctacttactccccatgccaggggtctcaacagcatgaggcagacaattcatccccctcctgggctctttgttgttgaaactttggttttgctcatttgaaacacacattcttacaacttttcctgtgagtcccaactttgccttctggagctatgcggtgtaaagaccactgctgtttttccacctggttccagggcttagaacaggggaacagccccattttcatggttaaggctctgtccttcccaacaccagtccttttgctccattatttgtctctctgtctctctcccttgaagggtggctttcaaatacttggagcattgtatggcaaagtttggaggtaaaaagacatgggtgtttgttgtgattccttcacttactggctgcatgaagtcggagaagttacttaaactttctgaatctaagttttctcatcttcaaaatgggtataattagcagttggtattaggtattacagatacctaccctgcagaattaatgtgaggattatatgaggtcatttgtatgaactatttggcatagaaactgactcatagtagtcagtcatcataggcagtcatccttttccttctcccctgtgtccctctgtcccccttgctggaggattaaggccttcaataagaactgaacagggcaacttgaaatctttcaaagtaaaaattttttgatgtgtctgtgattttgggtacaggaactcctaagaattgcttctcatttttactattaaatgattatttgaaagtcaaaacttaatattgcacttattttaattttttgaccagttctcccaaatcagtgtcttaaagattctgctttaaaaataagtttgccaaagatgtgttttctttttgttggtaaggtggcattgctgagaatctagcagagaagttgattggtgttctctttgaggtgtggttactagcttgtactcggtgcttcccaacacctccttattggaaaacagccaaggagatggtggctaactggaggcatcacccagcagtggtggagcagtggagcaaggtcatttgtgcactcacttccaggtaggttattgtcattgccctgccttccttcacctgtctgaccttaggcagctttctggcattcatggaatacattataacaaaggctgggtctgttattactgtactttagatacagaattgagccactttttaaatatagatataacagtttggctagtgcctgtttaaaacatttcagaataatcaagtattcttgagaaacagataaattttataccctacttcccccacaaaaaaattccactcttattttgatcattaaaatatgcatgatcattaaaatatgcctaatcattattttaaagaaacaaaccatagaaagatataatagaaaagttctcctgaaatcctaccatgtatatttatatataattttacaggaatgggaccatattatacatgctactttataaccaaagtaggcagtttttttataataataattttacctttttgccatttatatttaataccatcgctgttttataagtacactcttaggttcatttttttcagacttattttttcatttcaatcgtgattttaatatgcaagcataccttgttttattgcacttgactgtattgagcttcacggataccatgtttttttttttttccaaattgaagggttgtggcaaccctgcatcaagcgagtctgtcgggtgccatttttccaacagcatatgctcactttgtgcctctgtcatatgttggtaattcttgcgtatttcaaacttttactgttatggtgacctgtgatcagtgatctttaatattaccattgtaattgttttagagtgccacgtactacacctatataaaatggtgaacttaactgatcaatgttgtttgtgttctgacagctccactgaccagctgttttccgtctctttcccactcttgagacacaatgatactgaaattaggccaattagtaactctataatggcctcaaagtggtcgagtgaaaggaatagttggatgtctctcactttaaatcaaaagctagaaatgattaagtttaattaggaaggtgtgttgaaagccaaaacaggctgaaagctaggcctcttgcaccaaatggttagccaaggtgtgaatgcaaaggtaaagttcttgaaggaaattaaacatgctacaccactgaacacaggaatgataagaaagcaaaacaggcttatttatgatatggagaaagtttgagtgggctagataggagatcaaaccagtcacaacattttcttaagccaaagcgtgatccagagcaaggcctaactgtcttcagttctatgaaggctgcgagaggtgaggaagctgtagaagaaagcttaggaagaggccgaggttggttcatgaggtttaaggaaagaagccatgtctataacgtgaaagtgcaagctgaagcagcaagtgtgatggagaagctgcagcaagtgatccagatgatctagctaagatcattgacgaaggtggcctcactaaacaacagattttcagtgtgcattaaacagtcttgtattggaagaagacaccatctaggacttctatagctagagaggagaagtcagtgcctggcaagctgaagccagtgctcatttaccatttggaatatcctagggcccttaagaataatgttaaatttgcgcttgccttggcagcctatatactaagaatgatgttaaatttattctggctgtgtgcagtggctcacacctgtaatcccagcactttgggagtacgaggtgggcagattagttgagctcaggagtttgagaccactctgggcaacttggcaaaagcccatctctacaaaaaatagccaggtgtggtggcttgcgcctgtagaacacacctcccaggttcaagtgattcttgtgccttagcctcccgaataactgggattacagaggtgtgccaacatgtcctgctagtttttgtatttttagtagaggtgggggtttcaccatgttggccagtctggtctccaactcctagtctcaaaacaatccacccatctcagcctcccaaagtgcttggattacaggcatgagccactgtgcccagcgtgactttcaaatcttaagaaatacagctgaccattgaacaacatgtatttgaactgtgtgggtccacttacatgtagatttttctcaattaaaaatagtggaaaattttttttgaaatttgagacaatttgaaaaaatgtgcaaatgaaccgtgtatcctagaaatattgaaaaaattaagaaaaaattaggtatgtcgtaggcataaaatatatgtacatgctagtcttgtatcatttactaccataaaatacacacaaatgtattatactaaattaaaatttattaaaacttatgcatacaaatgcttatagactatatacatgataccatttgcagtaatgtaaacaataggtaaagaaatgtaaacaaacataaaagctgcagtattaaatcataattgcataaaattaactctggtacatactgtactactgtaataattttgtagccacttcctgttgctattgcaatgagctcaggtgttgtgaatattcactgaaaactccatgtgacactaatcatctctgcttgagcagttaatctcttcagtaaatagtgtatctcagtaaaaagtgatgtctcagttttcatttatttttcgtcatatttaatttacaatactgtaaacctggaataagtaataccatgagacccataggaagtgccaccagtggtgctggaagtgctcccaagaagcagagaaaactcatgacattacaagaaaaagttgaattgcttgatacgttctgttgtttgaggtctgcagctgtggtcacctgccagttcaggcagacaattgactttgtaaacagatgacataaacttatggtatcaataaacacagtacagtgctgtaaatgtaaatgtgttttctcttttatatgatttttttttgtttgagacagtctcactttttcacctagtctggagtgcagtggtgcgatctcagctcactgcaacctctgcctcattgcagcctctgcctcccatgctcaagtgattctcgtgcctcagcctccccagtagctgggattacaggcgtgagccaccatgcccagctaattttttagtatttttagtagagtcagggattctccatgttggccaagctggtctctaactccaggcctcatgtgagccgccccacctctgccttccaaagtgctgggattacaggcatgagccactgcgcctggcccttttttatgattttttttaaagagggggtcttgctgtgttgcccaggctagagtataatggctattcacacctcctgggcgcaagctgtttagattggtgcaaaagtaattgcggcttttgccatattttaattacttttgtaccaacacaatatcttctgcttcaagcctacaagtgtctgggactatgggtgtgctgctgcatctgattttccttatgattttcttaataacattttatttagctttctttattgtaagaataccatatataatacacatacaaaatatgtattagttatttgttattggtaaggcttctgattagaagtaggctattagtagttaagttttgagggagtcaaacattatacatagatttttcaactgtatgaggggccagcacctctagtccctattgttcaggggtcaactgtacattctgtaaggttatagctaccatatcaacattaacaggagtttggaagaagttgattccaaccctaatgaatgactctgaggggttcaaagcttcagtggaagaagtcactgcagatgaggtggagaagtagcaagagaactacaaattagaagtatagcccaaagagatgactaattgctgcaatgtcatgataaaactaatggtgaggagtcttatggatgagcaaagagtttcctgaggtggaatctactcctggtatagatgccatgaacattgttgaaatgacagcaaagtatttagaatattacataagcttaattggtaaagtaatggcagagtttgagaggattgactccgattttgaaagaagttctactatgggtaaaatgctatgaaatggcattgcatgccacagataaattttttgtgaaaagaagagtcagtccatgtggcacacctcattgttgtcttatttttaaaaactgccacagccaccccaaccttcagcagtcaccttcctgatcagtctgcagccatcaatgaggcaataccctccaccagtgaaaagatgactctagatgacgcaaacaaatggaaaaacattccatgttcatggattagaagaatcaaaatcattaaaatggccatactgcccatagcaatctacagattcaacactattcctgtcaaactaccagtgccattttttcacataactaggaaaaaacctattctaaaattcatattgcaaccaaaaaagagctctaatagccaaagcaaatcctaagcaaaaagaacaaagctggaggcttcacattacccaccttgaaactatactagagggctacagtcaccaaaacagcatggtactggtacaaaaacagatatataaactaatggaacagaatagagaacccagaagtaaagctgcataactacagccatctgatttttgacagagtcaataaaaacaagcaatggggaaaggactctctattcaataaatagtgcagggataactggctaaccatatgcagaagaatgaaactagactcctacctttcaccatatacaaaaattaactcaagatggattaaagatttaaatgtaatacctcaagctataagaatactagaagaaaacctaggaaacactattatggacatttgccttgggaaggaatttatgactcagtcctcaaaagtaattgcaacaaaaacaatcgacaagtggtacctaattaaactaaagagtttgcacagtaaaagaaactatcaacagagtaaatggaaaacctacagaatgggagaaaatattcacaaattatacatctgacagagatctaatatccagaatctataaggaacttaaagcaattgaacaagcaaaaaacaaccccgttaaaaaacaggcaaaagacatgaacagacacttatcaaaagaagacatataagtggccaagaaacatatgaaaaaatgctccacattactaatcatcaaacaaatgcaaatcaaaaccacaatgagataccatctcacaccaggcagaatgggtattattaaaaagtcaaaaaaacagtagatgctggcaagactgcagggaaaagggaatgcttatactctgctggtgggaatgtaaattagttccagctactgtggaaagcagttgggagatttctcaaagaacttaaaatacgactaccattcaacccagctatcccattgctgggtatatatccaaaagaaaacaaattgttctaccgaaaagacacatgcacttttatatattgcagcacgattcacaatagcaaagacatggaatcagcctagatgcccgtcggtggtagactgggtaaagaaaatgtggcacatatgcaccatggaatactatgcagccatgaaaaagaattaattgtgtcctttgtagcaacatggatgcagcttgaagccattatcctaagtgaattaacacaggaacagaaaaccaagtatcacatgttcttacttataagtgggtgctaaacattggacataaaactcatggacataaagatgacaacattagaaactgaggactgctggtgggggaagaggagcagtgttgaaaagtccagatgatgggatcatttgtaccccaagcctcagcatcatgcagtatacccagataacctgcacatgtacctcctgaatctaaaattaaagttggaaaattttaaaaagggaaaggattatgacttggtgaaggcacagataaattattagcatctttcagcagtaaaatattaatatttttaaattaaggatgtgcattgatttttaaacatataatcctattgcatacttaatcgactacagtatagtccaaacataacttttatatgcattgagaaaccaaaaaaacgtgcatgccttgctttttgcaatgtttgttttattagggtagtgtgaaactgaacctgcaagatctcgaagttatacccgtataactctagatatagataagggttctttaaaaaatataatacccttatcacacccaaaaaagttgacaattctttaataccggttagctagtcagtgttcaaatttccaggtacaattgaccctctgtgggttctgtatccatggacacagccagtcagagatcaaaaatatttggcaaaaaatttcacaaaattccaaagagtaaaaattgaatttgccttctactgcctgagtactgcatcgaatctgtgcaaatgaagggatgtgtatgcattgtattaggtattataagtaatcttgagacgatttaaagtatataggaagatgtgtgtaggttatatgcaaatactaaattattttatgtaagggggcttgagcatccgtggattttggcatctgaggggtgttctgcgtcaatcccctataattctgaaggacaactgtataggttcctgcttttttctttcctttttttttttgacagggtttcttactctgtcacccaggctggaatgcagtggtgcaatcacagcttactgcagccttaatctcttaggctcaagtgatcctcctgcctcagccacctgagtagctggaactgcaggcgtgcaccaccatgcttggctaatttttatatttttggtcaagatggggttcctccatgttgtccaggctggccttgaactcctgggctcgagcagtcctcctgccttggcctcccaaagttctggtattacaggcctgagtgaccacgcctggcctaggtttctgctttatttttctttgcaatttttttgttgaagaaactgggttgtcttacagagtgtttcacattttggatttgtccacattgttaattactatattcctctgccccgctgtatttcctataaactggtagttagatctagagacttgatctcattcaggtttgatagggggcaaagagagggggtgacaggaacaaaaactttataggtagtgttatgtatcagaaggtagacttctctttttctgagttaatgtttagatctttattattatttaaactaaaaaatgaagctttggaatattttgttaattctagtatatcacagagaacatgaatattatgaatctagccatgagcggtggctcacacctgtaatcccagcactttgggaggctgaggcaggatgattgctttaaaaaaattatgaatctgtttttaagtaatgcttttatcttgattataatcacagtacatgcttataatagaaaatttggaaaatgtagggacagatacctatcattcagagccaacccatgttaacattttaatgtattttttccatttagttccctttttaaaaatgccagtttgaaattattctatataatattatctacttttttcatttgatgtctgattcttgtcactttagttacacaaactttttctcattaaatagctgttgagatcatatttttaatggttttgtagttttccattatataattggaattataattcatttaataatttccttgttattgttgttgttatttttgtttttttgaggcagggtcttgctttgttgcccaggctggagtacagtggtatgatcaggactcatagcagcctcaacctccccaggctcaaacaatcctctcacctcagcctcccatggcagctgggagctacaggttcatgccaccacgcccagctaatttttgtattttttgtaaagatgaggttttgcatatcgcccaggcaggcaggactcaagctcctggactcaagtgatccactagacttggcctcccagagtgctgggattggagtgcaggcgtgagccactatgccagcgttgtttttttgtttttgtttttcttttttttttgagatatggtcttgctctgttgcccagggtggagtgcagtggcgcagtcatggctcattgtagcctcgaactcctgacctcaagcaatcctcccatcttcccctgctgttttgatatttatgttgttcccattgttttattttaaaaatattggtgatatgaatgctttatacatagtctttatatgtgagaatattatctctaggtagagaataattgagttaaagggctttgaatagttttaatacatttagaatattaagtaattaagttgttgagttatttttatggtatgtcataaattctaaacttcatgtaaaactattataacttagttatatggcagaaatttgcagtgagatgaatcttttaaaaaatttacatattgtatgattatataattatataagtataattacatatataaatagctataatttataagtaatatgcaatgtgtatatgtcaaacatattacatataaacatataaatgtcacagaaagacatttaaaaactaagatcactgacagctgaaaaacacaaactataactacaaaatgggaagaaatgataaaaaatgattaacatacctaacctataaaaaggtcataaagaataattcagaatcactgatacacaagtagaaaaattaggctagtcaaaccagaaagagaagagatgcaaggaaaaactttaagaatcagtttacaacagaataaatgtcccacagagcacatggatgggcctggaagagggacaagtaaaaagtgatgaagctgaactgaagagaattactatataaaagatagggacagcaggaagtaacagtattttaatactaattattttaaattatttaagtatcttaaataatttaaaacactctttttttggtatacttgtttattttacccaaaaactcatgtatcttgtaaagaagatgctgataacaacacgtgtattacatataaaatatatacaacagcatatactcttcttcccagcttctttccattagaaatcatcttgaaagtctccaatttgttttcaatgtaaaacttctttttaatgaacgcataatagttgtacatatttgtggagtacataatgatgttttgatatatatataaaaaatgtgtagtgattgatcagagtaattagcatatccatcatcccaaacataaaaaaactagaaatcctctttcagtttgtctgttttataaatgagggtttccatatgtcttgttcacgtatgtgaggtacacatgtttcatccattttctctgtcttctttctatgcttgagtgtatttttcaatctgttaagaaatggactcagtggtgtgcatttattttctagattgctacgctttacatatggtccttcatttcctgcatttaaagttcccgatgaagatgccagtctgatccctccagaaatggataatgagtgtgttgcacagacatggtttcgctttttacacatgttaaggtattgttattttattatttcatgtgccatttacctagtaagtatcttagggcaggaatcatgctgtaagtctcttgtttgaattcagaaggtggacactaagccccattcatcaaatggaatccagctggacaacaagcacatttctgtcctgtgcctcctgctctccccgtcccagcagggttaggctgtcctcagccgctcttggtttacacgctctaggaacgcgttccctgtggtagatgccgcacttgttctcttgcctgttactgcagccaggctgatgatctttctcttgggattttgtcacattctgtggggactggaggttgccttgctcctctctgtgcccagcactgactggtcagtctgcctctcagagccctcctccaatagcctgtttaaagtttcaatgggagatacaccctaaaatttcacagaggggtatactgctacttcctgctgtccctgtcttttatatagtaattctcttcagttcagcttcatcactttttacttgtccctcttccagccccatctgtgtgctctgtagaacatttattctgttgtaaactgattcttaaattttttccttgcatatcttctctttctggtttaactagcctaatttttctattttgtgtatcagtgattctgaattactctttatgacctttttataagttaggtatgttaatctttttttatcatttcttcccattttgtagttacagtttgtgtttttcagctgtcagtgatcttagtttttaaatgtctttctgtgatcattttctatttcctttgtgttctttgatcagatagtcacctatgatttcttccaatgttgtttcctttgtaatagtaagttcttttatatacctcaggatctgtctttatatgtatataaacacacacacgcacatacacacacacacacacacacacacacacacacacagacacacgcatgcatgtaatttgcagagatggggtcttcctacgttgcccaggcggtctcaaactcctggacttaagcaatccacccacttcagcctcccaaagtgctagggttacaagcatcgagccaccgcacccagcctggaatttgtctttagttcacatattactgcattaaattcatttgtttttatatcagattcacactcttattttaactttataatatttactgatatttagtaggtctaatgtctttttctctttttccttctcttagaatatttatctcttcttgcctgtttaacatttcagatcaattttagaaccaatttttcaagttacaaaacataagcaaacagaaggaaaaacctcaacgaaaccttctggggtttggattgtgtattatttagggtaaggaatatgtgctgctttagcaaatgaacttgaaaatcttttatagggccgggcgcggtggctcacgcctgtaatcccagcactttgggaggccgaggcgggcggatcacgaggtcaggagatcgagaccatcccggctaaaacggtgaaaccccgtctctactaaaaatacaaaaaattagccgggcgtagtggcgggcgcctgtagtcccagctacttgggaggctgaggcaggagaatggggtgaacccgggaggcggagcttgcagtgagccgagattgcgccactgcactccagcctgggcgacagagcgagactccgtctcaaaaaaaaaaaaaaaaagaaaatcttttataaagtctggagtcaggactggctctgctcacatagtcgttcagagacccagctggcagaggctctttcatcttcaacagatgactccattagggcctcagtgttataagcaggattctcgtatctggctagcagatggggaacagagagcaaggaaaattttgtgggagggttttatgtgtcaggccttgaagtaatataaatcactgttactcatattccattagccacaactcagacacacaccacacttaattgcaagagaacagagaagaaaagagaaagtggtgaacagctagccagactctgccgaagatgagaattgtattaagcttgtatttatatttaggaaacgctgatatctgatattgagtctgcctttcttttttttttttttaatttttttagtatttattgatcattcttgggtgtttctcggagagggggatttggcagggtcataggacaatagtggagggaaggtcagcagataaacatgtgaacaaaggtctctggttttcctaggcagagggccctgccgccttccgcagtgtttgtgtccctgggtacttgagattagggagtggtgatgactcttaacgggtatgctgccttcaagcatctgtttaacaaagcacatcttgcaccgccattaatccatttaaccctgagttgacacagcacatgttttagagagcacggggttgggggtaaggttataaattaacagcatcccaaggcagaagaatttttcttagtacagaacaaaatggagtctcctatgtctacttctttctacacagacacagtaacatctgatctctctttcttttccccacatttcccgcttttctattcgacaaaaccgccatcatcatcatggcccgttctcaatgagctgttgggtacacctcctagacggggtggcggccgggcagaggggctgctcacttcccagacggggcggccgggcagaggcgccccccacctcccagacagggcggcggccgggcgggggctgccccccacctcccggacggggcagctggcgagtctgcctttctaagagcatgtctttttctttttttagaattttgcgtatcttcttgaaatgttttacagttttcttcacaaagatttttaatattttctttaccattatttctaggtatttgttgctgatgttttgaaaagctaactcttttctgctattctgtcttctagatggttattactgctgtaaagaacattttttactgcatgttattttgcatattatatatagcatttaaaagagctctgaatatttcactgattcttctgagatatgggcacatatctgcaaataagaagtgtctcttttctaataattcatacttgttttggtgactaattaaaagtacttcggatgcagtaagacttggacctgacttaaattctgctagttttttctttgtgaacttgagcaatttattctctctgtgcctcagtttctttttaatctacataatgggaataatgatagtaccatctcgttataagtattgaagaagaaaaagcatgtaaaacggcatgatgcctagtgcatggtaggtgcttgaaagttgctattattacagttatttctgtatattattttactgcatccatcagaagtagaacactgttgaattaaagtgatactgttttggcaccttttttggtctgattttcatcggaatgcctctgatatatggaattttgagtaggatgttggttgttgatattagatgttcttttttatgctcctggtttcctaagcagttaaaaattttatttatttttatttatttattttttgagatggagtctcgctctgtcacccaggctggagtgcagtggcgcaatctctgctcactgcaagttccgcctcctgggttcacgccattcttctgcctcagcctcctgagtagctgggactacaggcgcccaccaccatgcctgactaattttttgtattttttagtagagacggggtttcaccatgttagccaggatggtcttgatctcttgacctcatgatccgcctgcctcggcctctcaaagtgctaggattacaggcttgagccaccacgcccggccagcaattaaaaatttttaaaaatataggccaggcacggtggctcacgcctataataatagcacttttggaggccaacgcgggtagatcacccaagcttaggagttcgagaccagcctgggcaacatggtgaaaccctgtctctactaaaaatacaaaaaatgggctgggcgtggtggctcacgcctgtaatcccaacactttgggaggccaaggtgggcggatcccttgaagtcaggagttcgagaccagcctggccaacatggtgaaaccctgtctctactaaaaatacaaaaattagctgggtgtggtggcacatgcctgtaatcccagctacttgggaggctgaggcaggagaatcgcttgaaccgggaagcagaggttgcactccagcccgggcgacagagcggcggcggtggggggtgggggggaagcaaaaaacaaattagctgagtatagtggtgcacctgtaatcctagctactcaggaggctgaagcacagggattgcttgaacccgggaggcagagttgcagtgagccaagatcataccactgtactctagcctgggcaacagagcaagactgtctcaaaaaaaaaaaaaaaattaaattaaaatataaataaactatagtaccgaattgtttcgaataatatttttggatccatttaagcaattaagtggtttttcttctttcatctgttgatgtgaaatattaattaatttcccaatgttgaaccatctatcattcctgaaagaaaagttttgcttggttatggaatgcttttcttttaatgtttttctgaattgtctgtagttctatcttttcatgaattggataggaaaactttctgtccttttttatggtctgttgtgtcaaagttttgtgttccttaagagtttgaaataaatgaacagtaaaactctagtcgagtcttttttagaggtagtacttagatagtctttcttcttgagctgactgtggtactttagtcagagttattttggatggcaaaaagaggagccaacttaagcaaatgcaggtgagaaaaagagattatgtgaagatagagcagtcttactaggctccatgaagcagcgaacaaccctttctcatgttggggagggatgaaggcaacctcgggacaagccactctgtcatttgtttctctttgcttttttgattctcttgtgcatgcacattgttctttctccagcaggcttgctcctgggtccctttttcctcctgcctttgagagggggacatgcagtctcttgataactgcccagtggtgtaaatagctgtgatactgtttgacttcagtgtttgtcctttcagttcacgggggctttccctttgcttagtttctccaaagggaaaattggatcaaattatcttcgttaattaggtctctggcaggcatctggatacctcctttaggacagttttacctcctttcttaaatgagctgcgactgggtagaaggcaggtcatgaggattttttatgattgtgattatttgtgattgttggcagatttcctaggatgaaggttgaatatgatggggagataggcatcaacattttgtcttgtgtgttagtgatttatctttttccaggaaaaccaaaaaatatttttcatttttgtttccatactgttgtcaaatgcttgtctttggacttgtgtatgcccacctgccctttaggccccatctggagattgtttcagtaaatttaggtctaatctggattttttaacaggttccccaaatgtgtcaggtacacggggcattgggaactgcaggaatgcagttgcttttagtttttcatatcctttgttacccattcttatttcaagttttacttactttcttgagtctgttctctaaatatttgggagccaataaaatcattcctggtttacctctggagaagctggtatgaatctttctctctccagtttttgatttacagtagacatgaatttagccaagctctgtgggacttaggtgtagttccatttcagctttactccttgttcttctaatttctgaatagttgaactacagcccccagcaggcactgctgctggagacgaatctcccttcctctgtcttacttggtggactagtccagttctatggaaacagtgtgctaccactggaagcccatttttcttacatgcacacacgttctcctttccgcaattacagttacttgaaattaagtcttttggtgggtggaaaaagaggttttgaaaggcagagcatgtatagatcactgattcctatttctcagcctagttcttttgccttgtagctagtggaaattctgtttaccggctttagattatcagtattactttgaattggagaggctttttaatggaatgctaagcagaccatttgagtgaaaaatcataatctgttttttaatggaaatatttcaaactgtttgtacataaaatgtaattcaaacacaaatacaccgttttgaaatttatggctttagtacatacacatgaacacaacataaaactattaacactaatcctgattttcaaatatagttgtttttttttaattgaaaatgttaatattaaagtaaaattttctccttggagcttttgttgacatatttatagctttaccattccattgctttttctttttttctttttttctttttttcctgagatggcatgttgctctgttgctcaggctggaatgcattggcatgatcatagctcactgcagcctcggccttgaactccttggctcaagtgatctgcctcagccttccaagtagttgggaccataggcacgtgccaccatgtccatctattgcttaattcttaacatattagaaaaagcatctatgtatactctcaaaattaaaattttttctagtcttactttgattctcatgcttggagtaggcaatgttcatgtaaccacactgcagatcttctgtaaagaagtgttgagatttgaatcgctggcccattaaatacaaatcagtctcttttctgaatcagagaaataggcacagtcctattcttaaattagattacgtgtattttattgctatagaaatttctaaatttgtgattaattctttcctctcttttaatagtaatcctgtggatttgagtaacccagctattataagctctactcccaaatttcaggaacagttcttgaatgtgagcggaatgccgcaagaattgaatcagtatccctgccttaaacatctgcctcaaatattttttcgtgccatgcgtggaatcagctgtctggtggatgcattcttaggtgaattttgtgtatgttgctagatgtatgaagagcttcatttagataactctagaggctaaccctaggagttattagaaaacatccgaaggaaaagatgaacagatttgatgacaaataacaagcgaggaaaaattatttgcaacaaataaaatagccagagggttatcgtttctatgtaaatatttagattggtgcaaaagtaattgcggtttttgccattaaaagtaatgcggccaaaactgcagttacttttgcacccacctaatacatcaaacaaagtgctaagaacaagaattaggcctagtagataaatggacaaaggataagagtaaatgattgcaaaagaaaagagtgttcatgcatactagctatccaggaaaatacagatgaaaatgcatttgggaccattctcatgtatatcattaaaaagcaaattatacctttagtgagccattcttttaagctgtttttcacattttagatatatgaaaagtcaattttttaacctgttgaaaggcagtgatttataatattttctaaaatatttatgtatacttattaatgtacagttaatatgttagctctgattaagtttggctgccacgtaacaaccaaaaatcctattgtaaacaagatagcttattttcacatatgttaaatctagggctaggcagtgtaatggttccatcaccagcagggatccaaggcccttccatctggtggctctccattctttgcacagtgcctcatgggccatgatggttgagtgagttccaaacatcctgtccaggaattaggaaggaaggagagtctgcatataattggtcctttaagaagatctcttagaagacctacccaacagtcaccaacttctttatggtcaaaatatggccacatctaggtgcaaagggagtttgaaaattgagtcattttttttctgggtagccatgtccatctaaagtttgtgttctgttactcaggaagaaatagtgagtagatactgagaggcaactagcaatctctgctatagtctatgtgtcccaagccttcactaggttactgggagaaattttctgatcatatattttgacctatgaagaataatttcatttgtcttttttttttttttaaggtatttctagaccccgatcagacagtgctcccccaacacccgtgaatagattaagtatgcctcaaagtgctgctgtcagtaccacccccccacataaccggaggcaccgggctgttactgtgaataaggccaccatgaagacaagcacagtaagagtttacatcaccattgttatgctatataaggttggctttttaatctgccattctttttataaagtcttgctattttctcagacttttcattggtatgggtgtattcttgtgttcgtctaataggttagtactgctcatgcctctaaagttcagcaccagacgtcctccacctctcctctgtcaagtccaaatcagactagttcagaaccccggccactgcctgcccctcggagaccaaaggttaacagcatcttgaatctctttggatcatggttatttgatgcagcatttgttcactgtaaacttcataatgggataaacagagacagcagcatgactggtaaatattactcaagaaatatgttatcattattttccttttcctttttctttttctttttagtctttcctacctgcaagattaatatgtatcttaaaaagctctctgtttctgaccaagcaatgtcttgtgcttaaccccttccagctgaagtaacagaacttaagaagttttcctccctgttctttttatgtatgttctatgaggtttggccttttgtctggttttattagacatacttaaggttagtcacattttgttgaatcagatttctttcagtaggtgacctggaagttcccttcatgtcagccaggataataaaatttatataaagaattaaaaattcgaactggaaatttacaagaagtgttttcgattttgacagccattcactcattagtatatgtaaacatcagaaaatttttgcttcacactacactctgacctctcaaattttagtctagagaactttatttcaagggcacactttcaaaaatattatttgctttttaacttaataaaattgattggtggagaattaataactcaaccctgatatcttcatttagattttattataaaaaggaaactgtctaagagctggtggttttttttgtcatcttaactattatatttgaaagtaatggcatagggtgcaggatggatgggtggggtagggcacaatgttttgaatatttataatatgtcttagagagctgaaaaatgacaatggctggcatttattgagctgctgttactattggccaggtactgtgatatatgcattaatgagtgtattgattgtttggtaagaaaccactcttctactggggttggaaatagatcaagacaaaaagatgtctaattagtttatgtatctctagggagactgtcagttccaaggataaaactaatacaatgaccagaagggtctctgctttctctcagaaatgaattcttagctgttactataattcttagctattattattatcatctcagaactaggatctatgtctgtgaacattatactcgtaattattttgaatattcttacaaatctttaatttagaaaagttgtgaatataaagatttttgggaatataatttgagaatgccatggttgagtttagggatgtctttgcttgctttattttgttcaaattcagacactttatattcttccattttcatattataattttatccacaatttgaaagtagtgcttctgggataggtaaatgtgcttacttacaataagtgaaaactttaaaaaaatgactattgggttattcttgtctttatgttcatgtaccttgtattttgagttttctgtaccatgtttatatttattaatttgcattttctagaatgaatcagtcctatttttcttttttctttttgttaagatgtaattcttacaatgtaacttttgggtatagagctgttgacactgaaatctgtgaatctagaatggctcaacctgttgcttggttggtgggcttgcttaaagggaacttatagatctttttgctctccagggagtttgtaacagctttgctcaccctcttgcaccagaagataaaaaccagacttcaaatcatacgtgaacaacatcttactttaaaatttttccttgctggggagaggatagaagctccttttctcctcattgtgttcagagatgataaaggctgttacattacccaggagatatgaggtgtccaaatagttaaaggggttagaatgctaggtgccaatcttgaggtctcaagtctggtgggaggcatgggtatattaactgttttttaagtactggctgccatcaaggaattctgccatgcagttcacctctaacttaaagtgtttgcttctttgaactggttagcttttgatttacatgacagtacactgtgctttgtaaaagtaacattgagctgggaagggttaatgaactaaaattttaatgcacgttatgggcacttcaaaacctcagttctttgtagttgtgtaattttcttcgttcattgttttgcatgatacaaaaatcataattttggacctgaatgcacaatttcctatgtttttgaactagcttgtggtatcgtaaagcttttaatttaacttttaaaaagctaaaaagcttcttaatttattgtaaaatttcaccatctttaaagtattttataattactactgtcctttgatttgtttccatttatttctattatcttgcagcatcttttatccaaattcttctttcttataaatcttgtaagtaggaaccagaagcttctccttaattgcagtcatgtttttatttttttcataattccattaaaaatttgattgtcattgtctcttgtagtttttgcacttgggaagaaaaatacttttctgtgttttgaatggggaagattgttggcaagagcaaattaatctgcctgaatcagtcccattatttctgtatactagtctggtcatgtcatgaattccaggactttgcactaactgtgttttggcttttttttttttttttttttttaaagctttaagcttatttttatacagatttagtgtttgatttgtatgcattctgcatgtagtgtttttcaaatgtattattgctggatagcttatttaggactaaaaatggctcatgggaagttgcataaagatttatgcttgactctgtattctattaaatctattataaaataatttaagcatttcatgtagagtaataaaagatttcagagtgattttcaatacactgtgaaatcttttgttaaaaataaaagcaactttcaaagggcttctgtttcagtgataacaaatgaccatgataatcttttttatcaatccaattttctgatttatcagcctcaagttagctgctgtctgtggttgttaaaattcattctcattttgcttggttgagcgattctttggtgtgtgttttggagttgggtgggtggtgggaatgctctctttttctccctgcccacttctcatccttactttgccctctccctaaagtatacagactggcatagggttgcccatttaattaggatgtccatctggggtaatgtgtaaattgcagtagctatttttcttaacgtttaagcatcattctgtagggggaagaaaaaacagaaaagaaataatagaaaagccaaattctgtattatatatctgtatgtggatacagatatatacaaatgtactctgctgatcaaaaattcagttgaaaaatgcttcttgtaccatctgttaaactgacaatgccactgtaaattaattgtaacctattttcaaagaagatttcagagagccctttttaaaaatattaagacatagttgctaaacaaaagcacttattggattcaagtagctatttaatgacaccaatatttgatctttgtgtccagggtcccatgagcctacgtggcatattgcaaatataataaaaccctccttttctctccccagccattacaacacaagctagcatggagtttcgacggaaagggtcacaaatgtccacagacaccatggtttccaatcctatgtttgatgcaagtgaatttcctgataactatgaagcaggaagagctgaggcttgtgggacactgtgtaggattttttgtagcaagaagactggagaagagattctgccagcttatttatccaggtcttggaatttttgtttgttttttcatttatatagttttgatagtgaagccattgttggttggccgactgaaccgatgagtgatgttggtctgaaatacctacagatgtctgtaagtgatcgacatttgcctgaaatctttcattttacctgtctcatcagatttggtaaagacccttaagaccctttttgttttagaagtgctatttatgtcatcttatttgaatctttttaatatggagagatttcgaaggaccacaattatttgttaacaaatttttagcacagtattcccatgtaggcagtccagaaataagtcagctgtaaatcctgcctccaaggagcttattttctgggcaaagccccaaacaaagccgtgtacacatgtaacaatgatccagcaggaattaggatattgatgggagaggcacagataatgtgctgtgggcattcaggggaagaagcagcgcacatttatttactgtaggggattcaggaaagagttttgggggattaaatgattatgctggacttataaaggatgagtagcatttagcctatgttagaaagttggttagggtcatcttctccaaatctatggcttcagccatctttgttaatgcctctgccatccattcagttgctcaggccagaaacgaagagtcattttagaatcctcttcttctgtatctttagttgatcaaccgatcaaccaactcttgccttcctgctacttaactctctttctgatctctcttttcactctatccccaccattatactttagactttgtcacttttctcctaaattaactcataatggcctcccgttcttcttgacactgttttgccttccttaactgatcattcacacaagtgcagaagtgaggttaatatcaacagagtatttagatatctgcatacttgctaggttctcaggagatagaattaaactgaccctatcagagggaaccaagtacagaattttatagatatgaaaaagaatggtatatacaggcaaataggcagggttatcataactatcggcgcttggtttaagcaacagaaaccctctcaatctgacttaagtaaaaggagaagaagttgtgagaagctagtgatatttattaaattctaaggtcaggaaatgcagtatggcctcatgaagagcagatactcaaggaccaaaacaactttattcctctctctttctctgtcttcctggtctgccagaactgcttcattcttctcttctctgcagatcattttctcttattgtagtgtgcttctgagttcccagttttcattagccgggcatgatggcatttgcctgtagtcccagctactcgggaagctgaggcagaagaatcgcttcaacccaggaggcggaggttgcagtgagccgagattgtgccactgcactccagcctgggcgacagagtgagactccgtctcaaaaaaaaaaaaaagttcccagttttcatggccttggtctaggtgaccatcaggaccaattagtatctctgaattttaattatagactcctgggaaggaggatctaattaatctgcctgtctctggtctagtcagctacagttgtgaaggtgggtcacataagggtgttggagctcacccacttgttgtgggggcatgtttctcaggaactctgggctggggagatatcctaaatggtactttggtagtaggggagaaggctatcaccatgaactttctgactgagccataagactgaatgggtggtagtaggacaaaccaaaacaacagattcatgagagggcaagttattagtttagttttgaatcgattgaatttgaagtgcctatgggatatttatcaacaaatatttattaagtcctactttgtgccagatattgtgcacagaagtaccataataatcactagacatccagatatccagtaagcttttgggtaatagatctggagttcagttgagaggtgtgggttagaatgatttgattatatttagtgacttaagaagtgtttaaaatcaggttagtaaaagagagagctttgagaactaaggttgtcagactgaggaacaccatctttagggggcaggtagagtaagaggacctgtaaaagaaaatggtcatagaaatcagggaagagcaaggagagaagggagtagttagagggctgaatgctttcaaaaggcagaatgagttaagacttagtcatgtctcttggatttggcaatcgagagcccattggttatttgctagtatggttttagttgagttctagggagagagatagattgaaatgggttgagcagtaaccagtaggtgatgaagttgtttctgaagagttttgcagagaagagaaactcacctcacaatagaagagtataacagtgcagctgctgttgaataacgggagattgaatgcttagtaagttgattagaggttgggggtggagttaaaaactaagctatattcaggtatattcctaaaaggaatcttattcaggtgaccttcatgatgaatacagatgatcgaatgcaggtttctttctttcattgtccccccaaaaataatggggaagggacaaaaatgtaaacacacctttttccctaggaattactaaatgttgcaacatttttctcttacggaatttaactcagcagttcccccagtttattgaaaagtactgcagcctgttgttttgttttgttctggttgccttatttgcaggcccctagaactttgagttgcaaggcttaaggtttgagaaggtgcaacagacatgaatttttttttttcttcattaagaaagatgatttgggtcttagtgtatatgattcagaattgttctaattccagtaatatcctttaaagggtaaaattccagtaattccagtaataacttttaaagggtaaaattctaataaattccagtaattccaataatgtcctttctttaaagggtaaaaatagtgatgagtggaaatagactttcagttaactatgtagcaaataataattatgaaaacttttgatcagcagtttgtttaaaatttttttcttgctttcctagattttacatgcttttaattcaaggtttgcagataaatgattatgtgtgccatcctgtcttggccagcgttattctaaactctcctcctttgttctgctgtgacttgaaagggattgatgttgtggttccttactttatttcagctcttgaaaccattttgcctgacaggtaagctatcattctctgctattatatcaactgtctgatttggcctggtctgttggtgcttcctccccagtttcctaatgtatcctgtccagttgtcttcatagtccaagagaactcaggcgacattaaatgagtgtagtgtgtccaaacccacctcatccctgaaatccttcagttctcatttgtctgtgggcttgttgaatcgtttttggcctggtctagaagggtaagaacaactccaacacagaggtcttacctttgtagagtaggccttacgttttaggtaaagaaatcaatcaatcaacttctagtttaattcagtaacagtttaacttagaaatatacaatatacaaatacacaatgcttggatttggaaaaattggcattatatgtatttggcagtagctaaaaatgtgctttagttcaaaaatactaatagctttttattttttggcagagaactctcaaaattcaaaagctatgtaaatccaacagaattgcgaagatcctccattaatatcctgctttctttgttgcccctccctcatcattttggcacagtcaaatctgaggtaatgttttgttaaagtttttttatatcctatattctgttttttgtactaatttaagtcaaatcgaatgttaaaaatgaaacaggagctttttttatttttcaattcaagttatttcatcaagttatttcaagtgaattaacaaagttgacttgtgattttttttttttgttctgtcagtttttctaccagttttcaagcagttataggctaaggacatctattaacatattgttagtgacagattcagcacagtggctaatattagactgaaagcctttctcattatactgatccgttcctccatctagctgttcccacatgggcatcataagctgcaacagctgatgttaaatattatttgttttttccataggtggtcctggaaggaaagtttagtaacgatgacagctcttcttatgataaaccaataacttttctgtccctgaagttgagacttgtgaatatattaataggtgccttgcaaactgaaacggaccccaacaacacccaaatgatattaggtttgtattcacacgttattttgtaagtgaaaccaaagtactgttgactacaggcctgctgaggaggcggcagtcggtaatgggagcctaaacctaatgtagctctacttactctgaatcagaggcacaagttagttttttaatgtaaaaaaatttaaagcagtgagatgagggaagtaaagtgttacagttgtcttggttggtcatttatttgtgcttttgcttttctttctcttctcccttctctcctttctccactctttgcctctccttcccatccctctcttctttcctcctttcttcctgctctccttcctcctgcctctttctcttcctcccgcctcgtcctcttcctcctgcctcttcctcttcttcttgcctcttcctcttactcctgcccattacttacaggtctcatcagtctgcactttcgtcctagtcctttttttctcaaacacatcagctaatgatttcttcagaaccttactttatatccctcctgctggggtgttctttccctagatttttgtttagcttttcttcatcatcttcttaagagagagcttccctaacaatacttgctaaagattatcttatttcatcatttttttcacaacacaaaacctgaaattatcttgtttgcttaaatgcttaaactccccgctttttacatgtttttcaaaatatatcataaggtatttggtgattgacaaatctagtgttagcactaagggacagtcttatctccctgaaaatcttcagagagaccctgatgaacagaggagctcttcttttcttcctctaatctgatgttcaaattgggtaaacagcaatgtattacatttgaaagcaaagggttttcagttgttgcttctgtgtctcagtgccactaaagtgcaatcctgggtattgagatcaccacccttgacagtggaagctcttaggaaagtagggctttcctcagccacctaacaggagtccccactgaaccatgtgaatgcaaataccatcccagcccacaaacctgggtggcagttagaactccccgcttatggagcaattgatctctgaggatgacttgaccttggcagtggttagaggctttctttcttctcttcattagcaagactagaattcagcttcttcctagcatcttagatttttatctgttcaaaagtgggatcagacattccctttaagcccttatgcccccagaggaggtggggtgtatgtccttccaacaggaacacaatccttgaaatggtttctaaaaggcctctaaaactgagggacagatcctgaagagatgggtcacaacggccaagaaccatatttatccagagacacctaattagtaggtgactggagttgtctgtagctgggcaaaaagttttttagggtttcgtaagtctcaaaagccattaattgtggacatgattttctagactcacaaatggagttttttgctctttacattctcagttatgatgtatagctatattcttgttcaggctgggcttttagagaccttctgaagttaatgtggtcagtctgaccaaggtttggaaccagagtctaccagtggcattgataatatctcagatacattctgaacacagagggtggtttatgtggagggggatgttttgatatgtgagaacctccaagttacaatgttttaggttatttaaataacataattttgcttgaaattatataatttctacgattgaagcagtatttggttttgttacacccttgctctgaggcactccctatgtactttccaaggaagagtcagttgttactcttgccataaagtggcaaagctctttccatcttctctttatccatagtgggcaagagtacctcccacggggatgagaagcagtgtgttaggctcaccatctcatttctgtcctagcctttccaggacaatggtttccttgataataaataaatgaagcttacttcagggtatgcagatgtcaacaagccccagactgtgtggctttaatcattcttaaaaagcagtgtggtcagaaagctattgctgtgactttattttgtaatttttgttttatttatttgtttctttttccctgtagaaaaaacagacagtaatgtttgttttatttttaagactagaacctagttttgaaagtattccataatattttccttagtttatattacccttgaaattgagatgcttacatctggtcttttacaccagttaaaaaatatctgataatgagcatgtttttatataaagcaagtttgaccttcacattcattttatttttatttatttatttatttatttatttatttatttatttatttaaatacaagttcttgctctgttgcccaggctggagcgcagtggtgcaatcatgggtcactgcagcccaagctcctggactcaagtgattcttctgccgcaacctctgaagtagctgggaccacaggcgtgtgccaccacacctggctaattttttgttgttgttagaatagggtcttgctctgttgcccaggctggtctcggacttctgggcttctccagtcctccctccttagcctcccaaaatgctgggattacaggtgtgagccactgtgcctggcccacatttattttagggaattttttttttttgagatggagtctcgctgtgtcacccaggctagagggcagtggcatgatcttggcttattgcaacctctgcctcctgggttcaagcaattcttccacctcaccctcctgagtacctgggattactggcacccgccaccacgcccagctaatttttgtattttttagtagacacaggattttaccatgttggccaagctggtcttgaactcctgatagcaaatgatctacctgccttacccttccaaagtgctgggattataggcatgaaccaatgcacctggccagaattaaggaatttttaaagagtctcttctgaccaatcagtggatttattagtagagttgacccttgaacaacatgggtgttagtgatgccaattccctgagtagttgagatccacatataactttttgattccctaaaaacttaactactgatagcctactgttgaccagaaaccttacccataccagttgattaacacatattttgtattttatgcatattattaatatatactgcatttttacaataaagtatgctggagaaaagaatattttattaagaaatacatgttgtaatcccagcattttgggaagctgaggtgggtgactcacgagaccaccctggccagcatggtgaaaccctgtatctactaaaaatacaaaaattagcagggtgtgatggcacatgcctgtagtctcagctacttgggaggctgagataggagaatgtttgaacacgggaggcggaggttgcagtgagccaagatcatgccattgcactgcagcctgggcaataagagcgaaactccgtctcaaaaaaaaaaaataaaataaaaataaaaataaagcttgggcgtggtggctcatgcctgtaatcccagaactttgggaggccgaggtgggtggatcacgaggtgaggagttcaagaccagcctggccaagatggtgaaaccccgtctctactcaaaatacaaaaaagaaaaaaaaaattagccaggcgtggtggcaggcgcctgtaattccagctactcggaggccgaggcagagaattgcttgaacccgggaggtggaggttgcagtgagccaagatcacgctactggactccagcctgggtgacggagtgaggctccatctcaaaaaaaagaaaatcataaggaagagaaaatacatttacagtactgtatttattgataccataaattgtctgtttataagataaatcgtctcaactgttgggcagttgtagctgtagaccccaatctacagtacatatcaagcaactcagctttttcttgtaatgtcatgacttttctctgcttcttgggagcacttccagcatcactagtggcacttcctatgggtcccatggcgttagtcaaggttcatggtgttgcagtaaacatgatgaaaacatgtgagaaccatggtatgcaatttactgcagtgttcagtctgttagagagatgaactactcacatggagatggttagcatcacattgtattttaagcagcatactcattaacacttgagctcaccccagtaacaacaggaggaggctacaaaatgattacagtagtgcagtatgtactacagctaattttatacagttatttaatactacatctttgtttacatttctctggactgcaaatggcatcatgtatggtctgtaagtgtttgtgtacgtaagttttttgataaattttagctttttattttttatttatttttagagacagggtcttgctttgttgcccactctggtctcaaactcctaggacttcaagcaatcctgctgactcggcctcccaaagtgctagaattacaggcatgagctagtatgcccggccaattttaactttttatacttttttaaatatttcttttctttctctttttttttttttgagatgaagtctcgctctgttgtccaggctggagagcagtggtgcaatttcggctcactgcaacctccacctcccaggttcaagcaattcccctgcctcagcctcctgagtagctgagattacaggcgcacaccaccatacccggctaatttttgtatttttagtagagatggggtttcaccatgttgaccaggctagtctcgaactcttgacctcccgccccacttcggccacccaaagtgctgggattataggcatgaaccactgtgcctggccatttttttttttttttaatatttctaggctatgcagtttgggagttttttcaaattgtcacagatctccaaaaaactttctaacatgtttattgaaaaaaacctgcatatgtacagttcaagctcttgtttaagagccaactataatttcatgggtatttcaggaatgctcaaccaaaattatattcttatctgtactattaatcatataaaatgtcttacgcattttagtgttcttgtgtattttatataaaatactgttttattgttgttgtaggggcaatgttaaatattgttcaagattcagcacttttggaagccattggttgccagatggagatggtaagaagcatacatgcaatctgtcagagaatatcacttttgaatttcatgtaaattatattccagaatgtccatctttgtgaattttaaaggcctttggtttgtaaatcctgctcattggctcagaagttttctttttaaaaataatgtatattttgaggtttgcttttcagtgcctcttcagctgtacatcaggttcccgagatattctgtatgagagaaactacagctaaatccagtctttattcctgaacagtgtctgcttaaaactgttacttgttttgctgtggtggcaaacttggttgaataacctaggaaaagccctagccagcaagcaactagtttaactttttcttacccatcaattctttctaacccctctagacctaagtttgcaggtccctcaaagcaccaatgcttccaaatcaaaaatgcttctcagagacttccagtgctctctgctttgtcttcaagatatatcatccctatacttggagtataggcaagacaatggaggggttaatagggtatactggggtaagttgggtagatgtagtaagctgagtagatgtaagatgggtgatcaaattattattacggaaattacattcgtgtctcagtagatggtgaataataatttactgatctgaatataatgaactgtgtttatatggggaaaaatgagggaagtctaacagataggtttattagcccctatacatacgggagttaaaactaaccctagtattgtttgtgttttctgatataactgtatttgaaagttgccgtttgtttattcatgcctttttgttttttgttttgttttgttttgctttggttttgagacagagtctcgctctgactcccaggcttgagtgcagtggcgcaatctctgctcgctgcaaactccgcctcccaggttcctgccattcttctgcctcagcctcccgagtagctgggactacaggcgcctgccactgcgcccggctaatttttttgtattttttaatagagatggggtttcactgtgttagccaggatggtctcgatctcctgacctcgtgatccgcctgcctcggcctcccaaagtgccgggattacaggtgtgagccagcgcgcctggccttattcatgctttttaagcttatatttctgttctgaggttttgcttgggaggcactagggtattctttttaaggacctggaatctagtgaagtctagtaaagatgaaaaagctgggccagccctttgtaaatagtggcaaagaagaccccagtatgggcacttgtagtagtacaaatccttcataccctccagtagatttgtgtgtgtaaaaataccacagtggttttaatcccttgtcaatttctgttactatcagtttgtactattcagttggcacattctgctttatcaacatggtttttaatgattgacctttatttatgcttgtaaactgtgatgtaatcctcacttgattcattttcatttgactagggtggtggagaaaataacctgaagagtcatagtcgcaccaatagtggtattagttcagcaagtggtggaagcacggagcccacgactcccgatagtgagagacctgctcaagctctcttaagagattatggttagtcgtgtttcttttgaaattcaaagtttaatagaatgactttaatgcttacatttataaaacaaaaacattaaaaatgttaatgttcatgttttttatatacttaagtataatagagaggatgtcagtcttaagaagctaagaaaaaacaaatctttttgatttagctgtatagcttttgggtagtatattagatttggggtagtatattaggttttataattgatagtaatgggtgatcagtaaacatttctgaattctctaccatgtgtggtggtagagaaccaaataagatgtggactctgcctcagagctcacagtgtagtggcagagatgtccaataagccagttattgcagtgtggcaaggagggtaatgggggatggattagatagcagcccagaggagagcatgtcttcatgttaaaacctgtgtaccccctactgtagctcactagattctttagccctgaaacatttttattttctgccctgccaagtaaaacatttgccagccaagcatcctatacaaggttgtcccctaccttgggcagttgttttatggattctgtgagtttgtgggtacctttatgtttttctacacaagtactaacagtgtattaaatctgtgagcacttatccagctagattggagtgatatctagattcttagatgtgagtttaatcctttaatcatctggagagttcatgagccatgttcatgaggttcatgaggcatgtcatgagccatgttcatgagttcatgaattcatgaggcatgtttctatggtttaagtttgcaacaagtatccttgaacatgtcagatatacataaagccattatgtggatatttgacacatttaaatattatattcgtgaagaagttatttaaattatcttattcactgtgtatgtagatttaggtattctataggttgaaaattatttttcatgctttctgaaacacatttaagctaaataaatttttcagtactggctgggcgcagtggctcactcctgtaatcccagcactttgggaggccaaggtgggcggatcacctgaggtcaggagttcgagaccagcctggccaacgtggtgaaaccccatctctactaaaaatacaaaaattagctgggggtgggggtgggtgcctgtaatcccagttactctggaggccaaggtaggagactctcttgaacctgggaggcagaggttgcagtgagccaagattgcgccactgtactccagcctgggcaacagagcgagactccatctcaaaaaaaaaaaaaaaaaacagaaaacaaaaacaaaaaaagaaatttttcattactgcatgtgttctaatataaatgttttaagtgattattgtttgtttcagcattttgagctggtgttagtgagctctgcttgtaatgtcgtaaaatattttttactaagaaatcctgatttgtgttagtgtcgcatgagtgtctctctttaatgatcattcctttttctgttgtcactgccctctttctgataggatcgacaggtataatgtccctaaagcttcctttataaattcagtttaatttgtctttatttaatttttcctaatttcctattagctaactagtgattgcttttacatatagattggagcccaaataaaaatatggtggcttggttatttaatttttttagaagtattaaagtaatcctggagaattaaatgttaaagtatgtttgaaaaggcattgcatgtgagttttgatggcttaaaccctgtaagtaatttcaacagatgcttgcttcagagtaattcctagcatctgaggaggccgtaaaattagaactttcctctgtaaagtttcaaggaaataattgatagccttttcatcactctttttgaaaatgtagctatgagttgataatttagaaactttaaattacgttgttatgaaaatgacactgaaactgccaaatcccacggttgtgtcaaagtgcgtgaaccaggaactagaagctgctctggtctagcacatgtgcctgtgcaccgtgtagtcaggcttggcactcaacccagtggggtggggagcgtagcactgtgtgggtgcccgtcgttctcactgtggctgctgtggtctgtgcctagtggatgctgtgcttctcgttactaatgcttagttgttttccctccctgtgggatgtggcattggggttatatcctagctcttaatacagattcagctgctgggctcctgattcgcagcattcatctcgtcacccaaagactcaactcccagtggcgccaagacatgagcatatcactggcagctctagagctcctctctggccttgcaaaggtgaggaagacagtccttttattttaacccaacagccttgggccttggctgttttttctgtatctcttaaccccttgtgtgggtattttagtgttgatcatgctcaaacatagtttatattatatccaaagtgtacaaaatttagcctccaagtgatattctatgcaatgaactttactttttaaaaataggttcaaagagtatgaatgagatttttaccgttaaattataggaaacatttcaatacttgccatttatttatttgcatataatactagaatgcatattgattttgtaaaaaatgattatcctaatgtatgccatttgggattacctgtggctctgccatcctccattatcagagataagtgaaaactggctacacctttttttttttttttttgagacggagtcttgctctgtcgcccagtctgtagcgtagtcgtgcaaacttgttgcactgcagcctccgcttccaagcaatccccctgcctcagcctccaactagctgggattacaggcatacgccatcacagccagctaatttttgtgtttttagtagagatggggtttcaccatgttggccaggctgatctcgaacttctgacctcaggtgatccacccgccttggcctcccaaagtgctaggattccaggtgtgagctactgcacctggccttggctacactttttagatttctttcccagccgttacttcagttttttggaaacttagaacttggtggtcatttgtgcttctctaagtgtattcttttgagatgaaatttgtgtaatataaaattagccatttaaaagcaaacaattcagtgactgttggtacattcacaatgttgagcaacttctacttctagttccaaaatgtttttatcatccctaaaggaaaccccatacccatgaagcagttttgcttcagtctccgcaccccctcctctgacaaccaccatttcatctcaatgggtctacctatactggacatttcatataaatggaatcatacaatgtgtgaccttttgtgtctggtttctttcactaaatgtaatgtttttgagtttcatttatgttgtagaatgtgtcagaactgtattcccttttatgattggataatatttcattgtgtgtatataccccagtttacccatttatcacttgatggacatttgggttgttttaatctctaggctgttgtcagtagtgctgctgtgaacatgtatgtacatgtatttgtttgaataccagttttcagttcttcgggtgtacactaggagcagaattactgggtcatatggtaaccctatgtttaactttttgaggaactgccaaactgtttttcacagtgactgaatcattttacattcccagtgtatgagagtttcactttctttgcattttctctaacatctaggtgttttcttgacagtaagatgagcaggattatcttacatataatatataattgaggaaatacgtaaaatattttgtgaacaaagagccgataaccaggtgctactgtctgggatgatatggttcaaatccttatttttcagttatgggaatagttgtcagaggctgtgacttacctaagctgtaagaaacaaaataagcaataaaacctaaggtgttcttaccaccacttagagcttacctcaaagatcctccaggatggacatcataactttgcgagaagcagttactggtacagaaaataaaaaacagccatttgtgagacatacaggaccacactgtctttgagagcaaggtactgtttcctgtgacctttagtacactcagtagtaagcaataattagtcctaaatggagcactgctctggacctgcctaacaattcataaagggctaacactacctgatttgatgatttactgtaaggctacagtaacacaacagcctggtattggcataggggtggacaaattgatcggtggaagaaaatagtatatccatacttaagtggtcatctgatttttgacaaaggtgcaaaggtaattcaaaggagaaagggtggtcttttcaaccagaggtactataaaacaattggatagtcatacacacaaaaaaaagccaaaaaattttgattcataccttgcactatgaacaaaaattaactcaaactggctgggcatggtgactcatgcctataatcccagcactttgggaggctgaggcaggaagagaccagtctgggcaacatagtgagactttgtctctattacataaaaatatatatataaaacctaaacaataaaacttctagaagaaaacaagagaaaatctttgtgaccttgggatagatttcttaggtgttacgctagaagaacaaactgatatgttggacttcaaaatttaaaactgctgttctttagtaaacactgttaaaagaatgagatgacagatcacaggctgggaggaaatgtttataaagcatatatttgatgaaagatttgtattcagattacataaagaactctcaggactcaataatagcctttccttttggtggtgcacagcagcaatatggtggtgaaaatttctaagaagaggaagtttgatagcatcttcagaaataaactgagcgaattcttcactcagaagcttgcagaaggtgactactctggagctgaggtccaagttatgccaaccaggatagaaatcactaccttagcctccaggatgcagagtgttcttggtgaaaagaaccaccggatctatgaattggctgagatagttcagaagaggtttggcttccttgagggcagggaaagctttatgctgaaaaggtggcctaaaataattctctatgccattgcccagacagagtctgtgctgtaaactactattagggtttgctgtgaggagagccttctgtagtgtgctgtggttcattatggagagtggggcaagagctacgaggtcatggtgtcagcgaaactctaaggacagagaactgaattcatgaacttttgtgtgtgatctgatgatccacagcagagaccttgttaactactgcattgatactgccatccaccatgtgctgctaagacagggtgtgctgggcatcaaagtgaagctcatgcgtcctgggcccaagtggtaagattggccttaagaatcccctgcctgaccacgtgagcactgtagaccctaaagatgagatactattcgccatgcccatctcaggacagatggttaggaagccatgctctacccagccccaactgtgtaatagggtctccttggcagctggatctggagtctggatgttgccttgtaaagacctttaataaaatcttttaagacaacaaaacacaacaacaaaagcccttaataatacaacaaacaacccaattaaaaattgggcaaaagatttgaatagatgttttatcagagatgatatacagatgacaaataagcacatgaaaaaaatactcaatatcattaattattagggaaattcaattaaaaccatgatgagataccactgcaaatctattagaatggctgaaatataaaagactggtcataccaaatgttggtgaggatgtggaggaactattgacgagaatgttaaatggagccaccattttggaaaacagcttggctgttccttaaaaaggtaagcatacacctacatatgacccaataattccactcctaggagataagagaacatttatcgatataaataccttgtacatgaatgtttatagcagctgtatttataatatccagaagctggaaacaacccaatgtccattaataagtaactagataaattgtggtatatccatgcagtggactactattcagcaatagaaatgaatgaacaattgatacacccaaaagtgtagctaagtctgaaaataactatgctgagtgaaagaaaccagaccaaaaaaagtacatattgtatgatctttatatgactttatttatttaaactctagaaaatgcaagctaatctatcgtgacagcagatcagcagttgcttagggagaggggcaaagaggagtgggaggaaggattacaaaggtgcatgaagagatttggaggtgatagatacatccgctgtcgattgtggtgatagttcacaggtgcatacttatgtcagaattgaccagttgtatacttgaaatattgggcaatttatgacaattatgcctctgagcagctgcacagaactttctgcagagcctagtgcatcactgtgaggttgggttaggggtttaaaaatgtgcccatgttctttcagtctctgggaatgatgaacaggtatacccaatgggtttgggttttagggcatgaaaaactatgctaatgaaatactgtttgagcacttgaaaaatgccactattttttgtggagtattacaatacatctgaaataatctgttcctgtatataaataatataaaaaagcaaggcttcctgtagtgtatgacattgtcaaataggtcaagcttcagtgcaaatgctttgaaattggtacagtaattcctggctgattgtttttgttctccaaatgaatatgctcaggtaaaagtgatggttgactcaggagaccggaagcgagccatcagttctgtgtgcacctacattgtttatcagtgtagtcggccagctcctttacactccagggatctgcactccatgatagtggcagcttttcagtgtctctgtgtctggctgacagagcaccctgatatgcttgatgaaaaggtgagtttattttattttaaaccattaagtaaaaacaaaaatgtatgctagcaaaatgccttttgaaagagaatatctaaatttaaatacagtattgcacactttaaactgaaaatacttgttagattacagtggaacacttgtccttttgggtacaacttgaaaactgtcattttgcttatatttggttgcaaattaactcatagagaaattgtttagaaagatgagaccttggctaatttatctgagctatcaagattgttctttcttgaaaggatggtagcctggagatagctagtaggcactttggtcacccttcaccaaacaaagaagggcagatgattgccaggctgcaaacctagagcacagctcatctataaaggttgcttctatcgaaaaatgttactccatactcatttcttcattctcaagtggatgcagataactagtccatgttccctaccattgttctgtgtaatgtcttccttatagggaagcaggtgttataaggaattcacagtgcaaatcaaaggagagatcattggatatttatagaaacctttatgtagtttaaggaataatattgttgattaaatcttagtcattttcattatggcttctgaagttgtaataccagaaattacttaaaaatgtcaatgacaagatttcctttggatattataatatgtcttaaaccatccccctcctttgatagctaagtccagagatggtgtctgtctctctgtggttacactatcccaagcttaactgaattactatttaatctcttagatttgtgcttttgtgatttatagtcttcagtaatttcacaagaaagttgaattgaatttatttatctaacactctaaacaccaaaatttagttctttaatgagaaattggggggagggggtgtaaagtttattatattactatgaagttaatatatatccattaaagaaattaccaagaaactggagcccttccaccaaaacgcaaccactgttagcatttggatggatttccttgtcttctcatgagaaaggtgtgttctaaaaattgatctgcctttcctgcttttaggactgccttaaggaagtactggagattgtggaactgggtatctcaggaagtaagtccaagaacaatgagcaagaggtcaagtacaaaggagataaggagccaaaccctgcatctatgagggtaaaggatgctgctgaagccaccctaacatggtatggaagtgaccgcacagggattgtgcctaggaattagatggggttagcagtgatccatgttgtttcatttccttcctgattgttcagcattgcgtgatgcagcccctttagaatatactttttctccagaaataaaatgggaagaaaatctctattttttttttacgtgttttgtagaccaaaagaaactaggaacttggggttgagagtttgagtcctttttctataccgtttgatgttaattcaagtaatactgtgttagagctagacttactgtaccccctcactttgatagctaagtccagagatggtgtctgtctctctgtggttacactgttagatctgctttccagctcagtggtctgtattctctgctataccatttatattacatagtataggttcattcaaccaagatttatgaactctcttaacaactgagaataggatcttaaagataagtctgatttagtcaccactacgtctaccatcttgtctggtagggaagataaaatatgaacacaaatagctataatattaggtggaaaataagtgctgcaaaagaggtataaataaaatgctggggagttgaaaggagaaaatgaatacttccagataaggggaagtcagagtaacatttcttgaggaaaatgacactggacctgactctgggaggatgggtcaagtttgagctgcaagccagagtacagggtgggtaaaaaggcaccacgactgctgttttgagaattttggtgtagtaaagtggtaaagacagggagtttggtaccttgaaaaagagtagcagagaaagttgagagagtttttgtttggcttgtaagtgagcatactggaaagagggaaggaaggcagcttagccacatttgtggactgaatggaacagttagtggaaattaggtggaaccatagtacacgtggaaagatggggcttatgaaaggatatgtgcagatgaaggctcagaaaatgtaaaagcagaaaggaggagtggcaagttagtgtgggctggggcatcttggtcttagtaaagtagcaggcaaaaccgcttgaaaattcgtgtgtaagtcagcccttaccaagatcccagcatcttctgtgagttcagtggcctgttgcttgcttgggacatgcacagtgaagttggatttgtttctattcctgtgggcttaagtcattcagtgaatttttagaagaatgctttctgtcatttagtcctgctcactatgcaaatgctggactttcggtgacttgatggaggtttggctaatagctagaaaattaaaaaaaaatgtgaatacagctactgaagcatgtgcttatgctgatgatgaatactagaagtaatataagttcagaaagaagaccatgtgtgggccagggtacccttaaaagtgtcatagggctgggcgcagtggctgcactttgggaggccgaggcgggtggatcacagggtcaagagatcgagacctcctggccagcatggtgaaaccccacctctactaaaaatacaaaaattagctgagtgtgatggtgcacacatgtagtcccagctactcaggaggctgaggcaggagaatcgcttgaacccaggacacggaggttgcagtgagccgagatcacaccatcctggcaacagagtgagattccatctcagaaaaaaaaaagtgtcatagaactaaaacttgatgcatgtcttaaagagtaagaaggatatggagagaaaggaggggacatttctcactagaaactcttcattatacaaaaataagcttgctccatcctagcctggatggggtgttctttgagtgcatggctagcagtgaggattggatatgtgctcagggtgagtagagtcttgggatgcttcttctcaacctcaccagtaagctacatggctcatctgtttcgcttcagctgtcttgtctctgctagcagcttgacaaatggtatctccagttttcagtcttaactgtcatcatgaaacgtgtctctaaccagatttctctgttctctcacaattgctgctttatgttagtatcattgctgtttgccagttatgcaaacacagaactttggctgtttctctgatttatctttctgtcattccccatgtacatgagccagtgactgagttaaacagactttatttttgtaaagtatttcctccatcccctccaacctggatagcatcctagtccaggccctcctcacttcttgcccaattgccctattttcgatctcttagcccttcttgttcattttgtattctattgcaaaactcatcatccttaagcacaattttgatcctgctgcttgaatgattgaaaaccttgagtagatctgtttccttccttgttgtctaaactcctcaatctggtttttaagggcaccatctgatcttttccaccactgctttgcaacttgtctgttttgccgttgtcaggcctgacagagcactgtggctatgaactagccatgcttatacctgcttatgctcttcccctgggtttcaggacctcttttttcttcacttggctacatcctccgctgttcagtgcttatagcaaatctatctacctccatggggcctttggttattctgcttctgaagatgactcttttctgtacttccgtgctcattctgtctgaccctgctgcacggcatggagttttatactgtcatgattgtacctggttacatgtgatccgtgctagtgttgtctcgccagtctggggagcacatttacctctttgccaacacagtgctgaacacgtagtagaaaattatggagtgcagattagctggttaggttttttttcctctctgtgtacactaatacaaattcaggattagggctcttggaagtcatttcaacagtccctttgcctgtcacctttaagacatgtgtaccaagttatttagcctctaatttggagattttctaacccccaaggttgcccatttcattttaattgttaaaaacttgatactttacattgagctaaaatctctcccacttctatgcgttggttctaattcatacatttgatcgttaaatcctttttgtccaggcagtagcagtatccagaagcagtcttcatgttctctctggttcatttctgctgttaccttcagttttttttttttttaaatattacaaagattcaagtacctttatcatcctggttattctcaactggcatagatttgactatgagcctcttacaggtggtttacagagtataatactctattattttgtatttttttcttgagacggagtctcgccctgtcacccaggctggagtgcaatggcatgatcttgactcactgcaactgccgcctcccagagtcaagcaattctcctccctcagcttcccgagtacctgggactacaggcacgtgccactacaccctgctaatttttgtatttttagtagagacggagttttgccatgttggccaagctggtcttgaactcctgacctcaggtgatccatccacctcggcctcccaaagtgctgggattacaggtgtgagccttctgcacccagctgagtacagtattctagatatgatttgatgatctttaaactctatataatactacattttcattaaaatgtactcggactgcattgcatttttgagaacttgatgatttgcattaagtcaactaaaatccttgagttttttttcacacgtttacctttcatgtgtttttctcatcctgacttgtttgggagtgtttgaaagtaatgcacagaactttacatttaaacctgaaatttcttcatctaagatttacctcattatttttagtctttaagattcttttggatctcaactctttctatggtatattatctctgcagctctgcttttgggcaactggacatttaatgagcatatcctgtgtgttctaaataccttgataaaaatattgaacagatagactcgcaaagcacatcatcagagcacttccttcaggtccacagggatttttaaatttagctacaagttcatgatattatatgaaatgttatttcatataatatgaaatgggaataataatggtatatgggaataatagtggtacctattgttaggatattatgtgaattgttgtgatattatgatactatatcacataatattataacaatcctatcagataggtaccattattcccattttataatgaaggaactgtagcacagaaagaaaatatcttaaaatgaagattttatcttgtggttctaatatcatctggcccttcatatgcatctcaatgggaagaccagtattctacagcaccacatttgtcatctcaactctcagcttgaatggcctctcctctttcactctaaggtttgaacctaaagctctctaacaatggagagcaacattgctcaacagattatttttcttccatttcctctcctcctaaaacgaagactgtctcagaacttcagggaccaggagaacttggcattaagttcaggcctctaatggtttgcagaaaataggagaaacaccaggagatcaataatgagaaaatatggcttttaaacaccaggagatcaataatgagaaaatatggctttggttttctaaaatgggatagagacggttgtcacaaagcatatggaatatgagcttgctgtgttccatgcaagattctaagatatcagataggttgctggtaagggagtaggtcactaagatcaaattataccagcctaactgcattttctgttccggatattgaccagactggaaaggcagattaaatgtctctgaaataaagacatacaggtatgcatctggggtaatgggctttttaatcttggaggggagagtctggacagcatgccatggcattcaccacaaggagtaaatctgacctgtcaagaagcatggctgtggtcaattaaaattcagaagagtggaaggggacacattgatgcacaaggtaaactgaagattttgctttgggaattaactgttatcttttccattctccatagcattatgcagttgctcggcgcatttccttcacctagtggtcctgcctctccttgtagtcttgtgaatgagaccactttgattaaatactccaggctgccaaccataaacaagcatagtttccggtactttgtcttggataacagtgtcatcctggcaatgctggaacaacctcttggaaatgagcagagtaagtttatagtactttgagccttctctactgcttaatcagtgttaccagtaccatgaagctgtttccaggatcagggaaggacagcctacagattctaagtaggtcagaaagatttctagctgtgggacaatagcacctgaaaaataggggggcaaaaaaatagaatatacatattacatagagtcttttaaaggctcttgatgtgcatctgaactagctctgtagttttataaaaggtggtgttttagtgggttccattgtgttgtttatctttgtcactttttcttcccccttgaacttcggatcctgcccctctgctcccctccctctcactcctcatgttctgtatcaattgttggtgctacctacacaggctagaaacttgaggagttatctttacctgccccttcctgttactcacttatataattagtttctaagtttccatcttcccagggacccttgaatttttcctttcctctgtattttcccaatacatccaagtgcaggtccttattatttctcacctagattattacagctgtttcctacctactctgattccctcaacccctaaaccccttgccagttctaacatgtgttttccctactttcatcctacttgctgccaccatagtattcatcttcaaccacaaatgaccatgccagtgccctactgaaaatccttcagtgattttccattaacacaacatgcactgttttcctcctttccctccccctcagttataagccatctcacaatatgtgattatcactgcgacccaaactatccacaagtacattttttttttctgatggtaattggcatcagccagtatgtaaaagaagcatgttctcagacccttattgctgggaaggggaaggaaagtgaaggttacagaatctgtgggtataaagtgacccatggagtcacctggtatacaattcccttagttatgagtgaaaaaactcaggctcacagagggtatatgacttgcccagggttacttgggactagagcccagattttctaaaccctgtattgtccctttctattattattgtcgcacagtgataggatttgctcagtgattaaagatttgccttcttgcctttgtaaaggtgaagagttctgtgccagttttgttgattatatgagtaagagctcataaatccatgaagtgaaagtgagacatttccctgcagtttgagatgaaaagaataccatcataaacttctgttgtgttgtggtgagatgcggtgacattaatgtgaaatggaatggtgccttttattattgtctaacttcagaactgctactcccaagtcttttctacaggcatctcatccttctctaccctagacatggagcttgcttggctttctttcctagcctgtgcctgttcatgattcctccagcctcctactccaagccatctgctgaggagtctgcaaaatcccagtgtccccttcaggcttcctggcctttttccagctttttaaagactctcctactttcattccaaataatttcattgcataggaagtgtaccaaaaatacaagcaattggaattgtatagatttacaaggacattttaatagtttattgtaataataagaaattatagagaagtttgaaggcgtttgactcccatatctgagacggaagaataaaaaaaaggatctgggtcactcgggaagtccatcctgagtgttttttttaacacccccatcatgtccctgaacttctgctgagatggaacagtgcctgcctgtggtgggcagtggtacacaaaggcatgggcagatataacactaacactgcaaacacccagtctgtctttctacacttaagttgttcccaacattgggaggttaagagtatttactaggacagtgtttcccacaaatgtgtacatgtaccattggaggtatgtgagatgatcttagttgatacattagtgaacattattttatgtatttttaagcatgtgctttaaaattatataattagtacatgccaaaattcatgattttccatttagagatgcacaagagtggttgatacaaagtaatagtacttacagtacacgggtatgggtacggcagaaaccacagaagtggtacacaaaagatcaaagcttaggaaacactgttgggcctttgattatgagaagctctgcagttgataacaagtttattttaaatggttgttgtctgaaattaaaacttttatatacatattttattctagatgattttttcccctctgtcactgtgctggtccggggaatgtctggaagacttgcttgggcacaacagctttgtcttttacccagaggagcaaaagcaaatcagaaggtattcatcagaagttacagggaagtgtgtgtgtgttttgtaatttaaaggttaggtaacattccaacagaagacacagatcaaataaatatttttgatccctagccagattctcagtcagtgggttcatatcagaatcatctaggaacctagaattccagatgtactcaattactctttaaagacatgttcaaggcaggtgtcttttcaaaaagctttccaggtgattctgacatctacttaggagtaattgctgttgtggacaatggccccagttttttccatgtaattttacaaatgtaataaaagtcagatatataccatacgtgaaaaaaatttggtgggacttttgatttgtccgcaacaggacttagtttgaaattgttttatatgatttgttcttatataataattggtaatatattgtataaattttattttttttataaagagtcagggtcttgttctgttgcccagactggagtgcagtggtgtaatcatagctcactgcagcctcaagctcctgggctccagtgatcctcttgcctcatcctcctgagtagctgagactgtaggcacatgccatggcacccagctcatttttaaaattttttgtagagatagggtcttgctttgttgcccaggctgatcccaaacttctgtcttcaagtgatcttcccacctcagcttcccaaagtgttaggattacagatgtgagctgtcacacccagcctaattaaaaaaaaaaaaaaaaatatatatatatatacacacacacacacatacatatacacacacacacacacatatgtatgctgtgtataatttaatgaaatcttttggggtgcagtttattttattacatttgtaattatgtgaataatacttgagaagttggaaaaattcagataacgaagaaattttaaatcacctttactcactatccagaggaatataaccactgctaatattttattggatttccttccctttttttcttttcatacacaataacacttgaatagaatttgagtcattttgtatactgctcttttcatttataacattgtaagcttttatttctgctattaaaaatataaaatgtccaacaatgatagactggattaagaaaatgtggcacatatacaccatggaacactatgcagccataaaaaatgatgagttcatgtcctttgtagggacatggatgaaattggaaatcatcattctcagtaaactatcgcaagaacaaaaaaccaaacaccgcatattctcactcataggtgggaattgaacagtgggaacacatggacacaggagggggaacatcacactctggggcctgttgtcgggtagggggagtggggagggatagcaatgggagatatacctaatgctagatgacgagttagtgggtgcagcgcaccagcatgtcacatgtatacatatttaactaacctgcacattatgcacatgtaccctaaaacttaaagtatcataataaaaaaatgtgattaaaaaaaatttaaaatgtgacttaatatttcactagcatttgagagacaccacaaaattggagcatgtgcctaaaatcatttaatatcttagatgtctctgttagatgtgatgtgtttatcacccagtcctccatttttttggagggggcagtacagagcacatcctgtcatcaactctgtaagccagtaagttagcattgaagactgaagaggaaggggaccaggaaaggagctaaaatttgtttagggttcaccatgtacccatatacatattaaagcatggatttggagctgtgaagacctagatttggtgcccatactctcaattaagccgtattaagattcttgttaaaatcactttctagagatgcccagtgaagccaaacttgtctttaattatattgaatgatgtgagagcccctggggaagagagtttgagtcttaaagctccaaaatgctatacccattggataaccactgaatgtgggagattcaggcctgcagcagtagaggtccacagcccatttgtcagtcattagatctataagaagtcgatgaatatttttagaaaaatagagtacacaggggcacaggctgcttccctttgctgttatctgtagcatttgcaggttctgagtgagtttttgtgacatgtaatcctagggaaacacaggcatctaagagaccagggaaatacatgtcattacagatgggtattggaccctgtgtaataaacataatgttacttgttttaacagctttttgtacctgaacctcgcccagttcctaaaaatgacgttggatttaaatattctgtgaaacatcggccatttcctgaagaggtggacaagattccttttgtgaaagcagatctcagcattccagatttgcatgaaatagtcactgaagaagtaagtacattatttttagctgttgtcaaggggatgaatagaaacattcttacgacttccttggtcaagacaatgcttttagtgttgttggagatgatttttaagatgacatgggcctccatcatccaggaggttgccatgtttaagacgaatatagattgtggctgatcgaaaggaactgcatatctcttagaggtgttgctgggctgcctggctgttcgtggtaggtttcagtactgtagtgacatgatcagactctggtagtagagttatttggaaaaggaagaccagttcagagactattatgagaatctaagtctttataagaaaggaaggactatttcactcatatggaattttaatatataaaatgtattgtggaggtagatccaagcagtcttgaattggtgagggaaggaaaagagccaaagaatttcagattttgagcttgagtgacaaagagatatcagtgccatttacagaaatgcagacattaggaagaggatagatttgggaagatgggaaaaatttatttggctttggattaatttagagagttaattaagataactgtctcttaggtcaagggagaagaattttaagaagtcggggacagaagtatgtcaggacatgagagaacagaagagcaggaatggaggaagggctacactctccaatgctggagagaccagggagaagaaggaatagaaaaagtcccctgaattttggcatgaaatttaggtgacctttgagaacaggtgtgtacagtaggagggataattcaaagggctggggagtgaatgtattgagggacaggcagtgaatagaaactacactgttaacagtaaaggcaagggtacagaatgggtaatattatagcttaaggaaatggcctcgttaaggaaagaaaaggctgatttttttttttttttctgagatggagtttcgctcttgttgcccagactagagtacagttgtgcattctcagctcactgcaatctccgcctcccgggttcaagtgattctcctacctcagcctcccaagtagctgtgattacaggcgcatgccaccatgcctggccaatttttgtatttttagtagagacgggatttcaccatgttggccaagccggtctcgaactcctgacctcaggtgatccaccctcctttgcctcccctcaaagtgctgagaattacaggtgtaagccatcgcacccggccagaaaaggctagtttttaaatatttttttacattcaaggatgtgaggattatgaacatgcttatagattgaaaggaagaaaccagtagagaggagtctggctaacactgtaagatgggcagtgggacttacaagtaatagaggcagtagggtcaagagtctagtctagaaaagagatgcttctaagacagaaggagagagtaggtgaaggttcagagacatttagagaggaaaggagggaaattgaagaagtttatgaaaattttaatcctggttcttggcagtgtaataggggatcccagacagttcttaagaattgccaggcagtgcagctgaggttaagtagcattatctatagtgaagttatttaactcactctgctgactttcttcaaaagtccttgggatctggaagcataagtaaagaatttgactggtgtggagattgacaggtgtggaaatttggaaggaggttcaacacagccatttaatgtgcttaaggagagggtatttagctgttagatgtgggggcttcagtttagttgggaagcagataaagccagaaggatgctaatggagtgggaaagcagggggagggattgagtgccccaccgcaatagtagagcacgagctcaggaagtgaagggataggagttgcacaagggggcttatgattggagagggaatttcagacttacagccctggaaagcagggcacatatcaggttcaagtttgttttcatggatggccaaaattgtgaaggttgaggagcttgtagaattctgagccaggttgttagaaggatcgttactcacccgggaatggaactttaaacaaggattgatcagaaggaaaggtgggagaagtctctaagagtacagtcatgtcatccatacagatgaggaattaaacacagggagcacgtcagggtgaagatggacagtgatctgcaagcgaggggtgagagtgacaactctgccccctttcttgcctatttgaagggaaccagagactgaatgttttcatttacagtgaaaacatgaaggagcaattgttgaaggtatagggaagtttttttggcatttgttttaaccttggaccatgtttgcttaatggcatactctacattgaactgaatcacaatgttgatcactgaaaattatcttcattttctttgttgcttgtagctttattttcattttaaaattaagattgacttagctaggtgcagtggggctcatgcctgtaatcccagcactttgggagcctaaggcaggaggatcacttgagcccaggagttcaagaccagcttggtcaacatagagcccagtctcaaaaaaaaaaaaaaaaaaaaaaaacacttaagattggccttactagtttgataatagtttcaaaaaatgaaatatttggtttattacagttagaagagagacacgaaaaattaaggagtggcatggcccagcagattgcttatgaaatacaccttgagcaacagagtgaggaggaattgcagaagagaagttttcctgacccagttacggattgcaagcccccgcctcctgcccaggaattccaaacagcccgcctttttctctcacactttggatttttgtccttagaagcactgaaggtaattttcatgaacttttatgaataaatatattcacaagttaacattcagctgacaatagctaaaatatttttatcaggatagaagcgaattaaaaaaaaaaaaaactggttaaaattttagcctgcatacaaataaatgaaattctgtgctgctgtaggttatagtttgtgctccaggacaggtcaccccatgaatgcattcagagttctgtctgaggggactggtttgatgatacatctaactctgaattttcctagataacacagtacccatattacacagataaatgaaatctatagataattagaagaagaatgttaaaaatcttcccctagtaagcattattactaaaaatataagctacaattaactttgctctttcatgccacttttagaaaagaatgaagttaatactgtagtatttgtaagtcaagcacttcttatgttgtccagtttgtaagatcaaactgtctggctttatgtcctggaatcactgcttgccagctatgtggtctttggtgagtttctcatcttgtcttagttcctcatcatctataaagtgaggatgataaaagtatccatctcattgatcatgtgaagattaaatgtgttaactcatagaagatacttggtatagtacttagcacaaagtaagccagcctataagataaatattgctattattcttaattccattagccttaaaacaattttacagccaggtgcggtggcttatgcctataatcccaacactttgggagcccaaggcaggaggatcacatgaggccaggagttcgagaccagtctgggcaacatagcgagacccccccatctctatgaaaaattgtttttaaaaattagctggatgtggtggcacacctataatactagcttctcaggagtctgaggcaagaggattgcttgagcctgagagttcgaggttacagtgagttatggtcactccactccactccagcctggttgacagagtgagaccctgtctcttgggaaaaaaaaatgtacaagacaagtgatgcaattcctgttttatagatgtggacatagaggcttaaatatgtgaaataacttgtctggaggtggacttggaatttactctaagtcctgtttgttttgaaaagtacaactgaagattgccaagcaagaagttgcttattgcataacttgtcccttgcccttactgcctaggaactacctggttataggccatttagctttgtaggaaagtaatggggacattgctgtttgattttgtatttcagcatgtagcgggaaaattttttttgtatttttgtattttttttgtagaaaattgagtttgatgcagcatatgaacataaaaacttaaaatgcagaataaaagagcagagagaggaaaattataagaaacatagtggtaaatatggaaggcaaggaaaaaagacacaacttgcaaatcattagtgatattcctagtggagaaaattgaacagagtagaagcagtaaataaaaatatactagaagaaaattaatgcttcctatggacttcagggacacaagaaaggccctaatagccttgtttctgagattatagttttccacttctgttatctgttctagttgaaacttaagcttttaagaaaataattatcatgctttctcatctgtatgagaacataggaaaaataaagttacctggtttatgaaccttagaatatttctaataacttaaacctgacagctcatacatacagaactacaaaccagttttacttatgaatgtatgtacaaaagtattaaagggaatgctaagcagacttagttctgaattaatagcatgttaagtgaattgttttccatgatcaaataaggtttatcccaggaacttagcaattaattaccaggaaatattaataaagctattaagaaaataatttggtcccattagcagttcagtcagtgaaacagtaagtcagtatttactagaatcatattctgattcttaaaaaaataacaaactaagccagcactactagtgtaggttcttactttaaaagattcctctaatgaaacccaggagcaaactagaggaatcttttgttaaaatcagaggtaaaagttatctatcttgactactatttaacaaagagaattttttagtcaatgacgttttttaaactttctagttttaaataattatagattagcaggaaattgcaaaataaagacatgaggaccttcctgcgatgataaattcttatataactacagtacagtataaaaatgaggaaagtcaatgaaatgttaaactaagaggtaaaaatcattggaaatgagaagacagtttgtaggtagtatgacttctagtttgacaaccgtaagaaaatcaataaaatatttaaaataaatgagacttaaggttgccatacaaaaaagtacaaaaattaatgattatgtctatgatattcagttaaaaatacaatgcaaaaatgccccatttacagctgtgatattgacaaaagttaccttaacaaactatgtacaagacctagaggaagaaacttttaacaattattaagagatataaaatatgtatgagttatgttcctggattagaagatcacacagaagaacaagctgaggaaataccttactttaaaaaaaaaagaagaatggggacattctgatctacaaggtgtattgcaacatgcttcaggtccacagttccttttccatgatttcaacgtaaaaactgaaaactggaaaattttttatatatttgtagtaaattcatttagtggcaaaattggacctgaattgacatgaggctgtttgtagttttatgtcacttagtgtgaatacacttatgtttgactgcagaaatattaatgtcttttattagaatattgccctagaccttgctaggaatgttatgtaattgactagaaggctagactcacaatccttgtcagtgtgaaagacagtcattcttgctttctctggaggatgctttcctgaaagatatactatggttagcaaaaccttgtttggcaagatcaagatctcaaagaagataggggattaagaggaaaacaaaacaaaaatgcatttttgaaaaatgtgtagacttaatttttttagagaagatttaggttttcagaacaattgagcagaaagggtagaaagctgtcatacaccttccccacagcccagtttcccctgttatcaacatcttgcattgatgtggtgcatttgttgtgactgatgaacctgtattggtgcattactcaccgaagtcggtgatttacaatagggttcactctgtgctgtacaggtctctggggtttgacaagtgtataatgacatgtgtctaccatcagttgtacaaatagttttactgccctaaaaatcccctgtactccacctattcatccctccctcttcactcctcactcaacacctagtagccactggtctttgtactgtttctctatagttttacctttttcagaatgtcatatagttggaatcatacagtatgtagtcctgtcacactggcttttttcacttttatcagtatgcatttaaggtttcttcattcagtatgcatttaatgtgtctttttgggttggtggtttatttctttttattgctgagtaatactccattgtatggatgcaccacagttgatttatcccttcatctattgaaagacatcttgattgcttccacgttttggttattatgaataaagctgctataaacatttgtgtgcaggcttttgtgtggatgtttgtgggaaaataccaaggtgtgcagttgctgcattgcatggtaagactgtgtttggctttgtaagaaactgccaaactgtcttccaaagtagctgtaccattttgcatttcaccagtaaggaatgagaaaaaaagtacattaaaagtaagttctagaaagcacaatattatagagaaaactggatccaaaaattatatacacaatataatctcagttgtctttaatttaaaaagaggcaaataaaagaactaaaaggaagtatgttaaatagtttctttagtttaggattatggttgtgtttattcctaccattctatattttttaattttatttttattaaaccatgagcaagtattgtttttataattataacaatgaaagaaaataggtaataattgctcctttcttcttttggtggcaggaacctgcaaatagtcgtctacctcctcaccttattgcacttgattccacgatacctggattttttgatgacattgggtatctggatctcttgccatgtcgtccttttgacacagtttttattttctatatgaagccaggtcagaaaacgaaccaagaggtaagagttacgaattttttttttttggtatgtttttgtgctataaatacacgtctaaagaaaaaaattgaggcaaaattaatatggagagtttatttgggccagagttgaggactgcagcctgggaagtgctggaaagtgcttccaagaacaaaggagaggctcaagtttttaaagataaaaaggatgagtcaggagagtaggcaattacaaaagttgtttttcaggacttctcattggtttacagaaataacattgattaatgagtggatataaattattgaactgtaggatatgagctatggtgtccagcactgttagattagctaatgaactgttggtggtgacacacagtctagagtccatatagcacgcagcttcaaagtgattacttagctcaagcgggagtgagatgtgactgctatcaaaaaagtgcctttctaggcatgataatttgagggagactcacattccttaaaaagtttcattttcatatacaaaattttacatggtatgcacttgtctatggtaagaagtattttgtacttgatgcctaaagacttgctatgaaccagtttgaaaacagaattaatgaaaactatgatgcttagagtcctgagtcttttgacccttaaggaatgtgatttaaataggagctgtaggatatctttcttccccttaaggaattcagattcacaagacaaaagaaactgaaataacgaaggttagtcataaaagttaaagtaaggctcaagaagaataaaacaatagcaacaaatatttatggaacatcttccctgtggctcagcatcccaggatatagaagtgagtaacagtttcctttttgagaagcagctcaccttcctagtaatttcagaagcaaatcatttcagttgaggaatgcatagtgtgcagtgggagaaataacacctgaaataaaggagaaaaacagaaggactggccgggtgtggtggctcacgcctgtaatcccagcactttgggaggccgaggcggatggatcacccaaggtcaggagttcaagacaagcctggccaacatggtggaaccctgtctctactgaaaatacaaaaattagccagcgtggtggcaggcacctgtagtcccagctgcttgggaggctgaggcaggagaactgcttgaacccgggaagcagaggttgcagtgagccaagattgcaccattgcactccagcctgggcgaagaagtgagactccatctcaaaaacaaaacaaaacagaaggactaagtaaaacatacctggatacgtggaacaaagagactaagagaaggacgaagaaaaatgtaagataggtgagaatggaaaactgagagcaaaatggcaggagacttgaagtgctttttggaaaggaataattgaaatatggaataggcaggaagttactgactgtaactaggaaagagccgaaggaagacttgtaaaatgtcgtattcagatgtgtagggcactgtgactacatgatcctggaattttactgtagtcattttaagacaatcagctaatcaaattagcatgcctaaagaaatttaccaaagtttccaaatgtttacactagaagcactgtttcaaatgatttgtgagctcctagaaaagaacactgatttatgagaaagttttttttttttgttattgagtcaataaagttaagaagtgtctgttgttaggtaccagggttatagtgccgaacaaaatctacaagatttctggccccctaaaactactgcatagaagggaaggcagatgattaaataagcaaacaaccattgtaaagggtgttaatagggtcattaaagcatgttataggagccatagcaggaaaacctaatctggttttaagaaggtggcctggaggaaaagatattctagctggtatttaaggtgtgccttaactgtaggtaaggaggtagaagcagattgtcactgacaaaataataataacgtgtaaattcttcagggtaaagagagcatttcttcatgaatttcattatggggtctaatatgcttggagcttaagagaaggtgggctgggggtagccagagatgagaccgatggagtcaagtgttttagaagaagctcagtaaaattggattaattatggaggtggggatctgttttgcagcaaatcagtgcattgttttgtataagaataatggagccacttttctcctgcctgtacaagaagacacaaacccttgaggcacctcctaacccagttcagtttccttagctttttagaagctgagggtgactaggaattaatgaagatttcctgagatctcctttggaatgtctaagacctgccttccctagccgtagggtagattaagattaatttctgtctgccagcaagtggcatgaaagttgaatttgattcacttactgcttcttgactaaattttcaaaaattgtttatttaaaagttttacttctagataaaaatttgaattgcaaaaactagaaatggttgttaagtcagtttcttggcgtccataagaatgtgaagggatatgggtaaactaaataggttcacttcaaaagagactggttttaggccgggtgtggtggctcatgcctgtaatcccagcacttgggaggccgaggcgcgcggatcacgaggtcaggagatcgagaccatcctggctaacatggtaaaacccgtttttactaaaaatacaaaaaaattagctgggtgtggtggcgggagcctgtagtccagctgctcgggtggctgaggcaggagaatggcgtgaacccgggaggtggagcttgcagtgagcagagattgcgccactgcactccagcctgggcgacagagcaagactccgtctcaaaagaaaagaaaaaatagtctggttttgtgtttaagaggtaatgaccttgagatgatttgcagtgggtcagatgtaatgaatgtaacttcctatattttgactttcacaggcctctgtatgatcttggtatagattagcattgtatgaatgacatcagtgatttgtggactggctgcatcacagtcatttggaggaatttttagaaatagtgattccaggattccgccttcactgattttaatgtagaaggtctagagcaggcgaagagaaccttatttttaggagatttcccagatgattttgatatactctgctctctaccctcccccttttatttttcatttgcaagggaatttcttagtttccttcctttaaaagtgagtttttcaagagcagcactattgccatcttgggccagataagttctttgttacgggggctatcctgtgtattttagaacatttagcagcatctttggcctctaccactagatatttgtagtgtgcctcaccagttatgacaaccaaaaatgtctccaaatgttggatgtctgctgaagagcaaaatcacccctagatgagaagcactgttttagaatgaaggactctttgtgaggccagtagaaaccccacgcattacatttagtgcttagtgaagaggagagaactttctggacacttcatttttcctggaattctcttctttggcctaagaaaaggatattttcatactcatttattaattacacctaatgtttattgaattttagtagattttatagcatttatcaagatttatagttaaataattgcatacctatgtaatgtttctcattaaccagacagtaaactctgtgaaggcagggacatagtgtcttttagtaaacatgcctggttcagtaattgttttgccaggaagagagctcagggcttttcttgcattacttcacaaccattattattatctctactttatggattaagaaactgaggcagtggggttaagaaacttgcccaaggctcagccaatccaaatctgtctaactctggagaatgcatttttctctatagtgatatatcctcaaatttattctgagcttggacatgatttgtcagaagcttcaaaactaaccaatttttatgaagatttattttgatatattattttgtttccttcattatagctgatgattggtatgtatttcagattttaaagaatgtggagtcttccagaactgttcagccacatttcctagaatttttgctttcccttggctggtcagtagatgtgggcagacaccctggttggactgggcatgtttctaccagttggtctattaattgttgtgatgatggtgaaggatctcaacaaggtaaaactcacagtgtttcaaatgtcagttgtttcttgtttgttagtcttgtttttttttttccccctttactgtgatttatagtcttgttaaaaatacaaaaccaggctgggtacagtggcgcatgcctgtcttcaagaagccaaggtgggaggatcgactgaggctaggagttcaagaccagcctggaaaacatagcgagacaccatctctacaaaaaatgaaaacatttctaggcttgagggccatgtatttgtagtcctacctgctcaggaggctgaggtgggaggatcacttgaggccagggattggagctatgatcatgccacagcattccagcctgggtgacagagcaactccctgtctctaaaaactaaacagaggtatatagaggaaaagtatccttcccctaatcccagtcctgacagggtaacttagtaacagtttatatattctagacattttcagtgtatatgaaagatatgtatacacataatgatagagttaatacaaaatgactggcttattacaatgctgataagttccttttttataatatgcataagattcaattttctatacaaatggtgtaatataggtcatccatacaaacaatacagcttcctaacaagcatgttttgtctaataagtagttttctattaaccagtgtgttttaccaactgtggctatcaaaacagtcacacttaaaggttatattcttgggatattataccaaaacctttgtagtaaacagctgaccatctctgaggattcttgcccatccccgcagatcctctgaggaactgtaatcaggataacaagtagcagagcaagtataaacttaaacttaagacctttgccccacctggctaatgctttctgttcctgggctcctgaggtcactggaaagttagtgttacctctctaaagtggataatgcctatgcccagtgcacatttttccttttgataaatatatcagttggatacttatggttgcaagtatcagaaaacgtgacccaaactgccttagattttaaagataatttattgcccatgtaactaaaaattccagaggttggttaagtttttggtgtcatttgattagcattcctgttttatttctttacaattttcctttagctttgctctccatattttggctttgtccccagcctggcttctctaatagtgcagaaaggcaattccaggctttacattcacataccacagcagcctgaagaggagagattagccagatctcagaactccctactccccgaatccggaactatatggcgattagactatcccaagcctgtccttatggcaagaaagatagaatgactctggtagagagatacaggcaagctagaactagtatcagaggtcagtcccacctgcacattttgcctgctgcagaataggggtggatagagtggctattgggatagtaaccacagcatctactacatcaaatacaaagtgcctgcccggagcccacaccaggagtcagaaaactaaagccctgtttttgtaaataaagttttattggaactcggtcacactctagattatacattgtctatgacagctttcatgctacaatgacagaatcgagtagttgtggcaaagaccctgtggcttacaaagcctaaaatgttatctgtctggtcctttacagaaaaagtttgctaacctcttgtctaaagcttcctatttgccataccttcaccagaattaggtatcttccaattttttcggtgagaaatttttaatttttaataatggttgagcatatcttatcatatttttatttattccctgagaagtacttgtccatttcccctttccaatttttggtccgattgttggtcttttatgtattgctagtaggacactgagttcattttaattgagaactatatagctctcatgaatgtttcttttgttaattcagtcttcctggcttagagcagatactattactaaaactggctgtacatttttatacagtgtcactgaccattgaggaaggtggaacataggccaacttgaggagccatagagagagaccagggatagaaatgccttaaaagcaagagtccagagataacgcacatgtgcactctctctcttctctctcttcttctctctctctgtctcttcctccctcctcctcctcttcctcctcctcttttcctcctcctcctcccttcttcttcttcttcttcttcctcttcccccctctctctctctctctgtctctctctctctctctctgcctgcctgcctgcctgcctgtctctctggcccaactcccttctgagggactgggatggtcttccttttgattatttatttactggatccaaaggactgctcccttaatctgcttcatacacttgaattaaaagccctgctaatcagaagtggtctgatatacagtcgtttcagaaattatgaaattaagattttattatttaaaaataaagacatctaataagcattatattttattctttcatactaattggttcttgttgaaaacatatattctatttatcactttattaaccagttaacatttcatgtagcaagatgatactggttttttcctactttttgaagcggtaatgtagtgtttctttttcccagaagaagtgatttcctctgaagatattggagctagcattttcaatggacagaagaaggtgctgtattatgctgatgcccttacagaaattgcttttgtggttccttctcctgtggagtccttaagtaagatgatttttgcatggtcctgttttaggatctatttttatattcctgggttgtgtgatattactgcattggaagagattttgaagtgatctaaggcattctttagcttctaaggcattataacaatatgcagaagcacaagatgtcttctcttaacttttttatggaaagtagttaaagacaagcagactgaccctctaataatctttaaatagtgaaggaatcccatttcaactgatattttgctttctttaatctaattaatcaatacataggcttattttccagttcatttctttctctaattacgagtgatccctcacctacttttctattcccatatgagagcctttgcatggaaccacctagaatcctacaactggaagtatctcatgatagcatatggccattcttctaacactgagcaagagaaacttcagcagcctagaaaagatggtggtccaagactttttaagaattgggagtaattattacttcttagtctgaactcacagttttattttgcccagaacctttgctctttgcaaattaagcctgtttgttcatgcctgaccgagtaggtggtctggcagtaggtgggaaacttcaccttcttctttgagatcatttgtaggatgggatactatacatcacgatttcagtcttatttccagactaatgacttttgttgtgccctaccttggtagctgcctaacctttgtacttggacccttgatttctcactctaggcccctccctgtcttactctctggggccggctgtgttcctggaaggttggaccttccatggtttaggtttgaattataacagctgttgggcttcccgtcaaggttctggtttactacttataattccagaagccagaacctgtccgtcctctttggggacatacctgcctggtttctctggcccagcctgttagtaccagacaagtcctcccagagctagagcctcgtccttattctatagctcctgcaattgggtctttgtctcctgttgtgaaacatctcctatgccaactgtgcccactccaactcagcttcctcctatttctgatatttggggatttttttggatggggtggaggataactttctgtgtacttatctccaaccagattgctcttaatcacagagactagatcttctgtagcttctggatgtcccagtgcctatttggcacaatgctacatgattgaatatataatctaaataattcagagagtaataatggcatttattatattctacatctgaaacgtcaaatattttctagtcttattttggttatcctttagagcaggagctggcaaaccacagtggcacaagccaaatgccgccaagaatgggttttacattcttaaagggttataaataaaatataaagaagaatatgcgagagatctgtatagccagcaaagcctaaaatacttagtacttgatcctttacagaaaaaagtttgtcagcccttgctctcgaagcaatgctttgtttaagtgatttaggttagactggtgagcataattagttttaacagccttgctccaaataagtggtatgtattatagttgctttttttcctttaccccatagctgattcattggaaagtaacatctcggaccaagatagtgattcaaatatggatcttatgccaggaattctgaaacagccatccctgacacttgagcttttccccaatcatacagacaatcttaattcctcacagagggtaagttactttgttgataggtctccaaaattttgtagtgaaatcagggtaattatagaatcctgcctgaaaagcttttaacccagagagtatttatatcagagtactgattccttagtaacttaattttttaaaataaaattctcacgattttctctttttcagcctgtaacaaatagttcattctgagacagcctttgtggtttctcttgatttcaccattctggtcccgtacttgattctctcatctgttcctttttaagcctaggttttaattttgtccctgaaatatccactaaagttactgcagtaactacatgtttttttatctttaatcttgcaatgttcatcttaaacaagtctgaccatataaaaataggaacattagggagaataactcagtatatggataaatattctgagtgaggaacacagcacctactacaagaggagctttttgctttatcttttttcttaccttatcagcaaatgttactttatctgtgatcaggtcagaagtgtaggaagattgacttagaacaaaacataacaaagacagaagtgtcagcttgactaaaggtgttcctccattgtacaggattttaggttagcttccttccacagtgaaagttatttttaatgtaagtgtatgcttaaaagagaatacggggaggtttttacctttaaaattgatttaggaaaaaaatgccaggtggtgtaatagtccctggagtagattgatttgagaatcaggagtttttaaaaggttttacagaatacagtttagagatgatcagtcagtattgcatagcaatgcaagattttagccaaatctaatacttactttaaaagttttttttatttgagatttgtggacagaactagtattcagtgattagctgcccttatactcattttctgaatgccagcatagttattccttagaacccagataaagcaccatgtttttgtttctcacttatactgtactttgcagacactaacagactaaaaacaaaaaaacaaaaacaaaaaaaaaacaaagcaaaaccatatggttatctcaatagatggagaaaacgcagttgacaaaaattcagtactcatttatgagaaaagttctcagcaaactatgaatagaactttctcaacttgatacagagcatctactaaaaacctacagctaacattatacttatacattgtacattattcttgaatgcttttcctctgaggtggagaacaaggcaaggatgcctgttctcaccacttacgttcaacatggtagaggaggggcctacacagagaaataagacaaaaggaaacatagtacataaagattagaaacaaagaagtaaaactgtatgtatttgcagatgacatgatcatgtaagtagaaaaccctcaggaatctttttaaaaatccactagaactattgaggtgagtttagcaagattgcaggaaaaacgccagggtgttgggcaaaattttaaggtaacccccagcgacgtttgcctgtgtacagtgtcctctccttgcgtgtgggtggaacttgtgactatgataggataactgtgattatgttacattatttggcaaagggatcctgtgggtttaattgggttactttgagttaatcaaaagggagattttccaagtagacctgacctaatcacaggagctctttaaatctagggctagaggtcagagatggaagaagttagagagagagtcaaagctaaatagggaccttgatactaagaaagtagtctgtgaatatggccagatgtttgtcactagtttgggagaaatctcttggtctggacattttctgtgaatgtcagagtagatataattatccggggggacttgccatggactctggtcatctggtaaagacatgtatatttctgtgctaataaagtagttttaattttaaaattcacctcaagtatgagattcttccctctgtacacatgagctttgtttagggctttagcacaaacttagctctgctgcatgcctcaaaagaggtgcagctcagggtaccagtttgctaaaggggagccacatagtcctgttaaccttgcagtgaaacttaagagttgattagggtggcaggaagccagaagcacactgcatggtaatgaagccccaaacaactcgtttttctttctactgatgagaaaaaggaattaagcataaattgcagtaggagacatttggtctggaatctaggaataacttgctgatgggacattttagagattaggatccccagacaagtagtgatgttgctgtgatggggaaggatactgctttctggccctaacagagatagactcaaatcttttaagccctcattaagatactgtgtgtaaattttgtttttattaatgcaaattataattattcagtattccttcctttttttttctttgacaattttaagccttgtcctaggttaagactgatgaacaggagccaaagaagagctttgttgcaaatgtatacactttttcctaaagtgattttccatgacctgatacttggtcactgagcaccttgacaaatgaatgactgggtagttttattaagccagttttttgttgctgttgtttttcccgctctctgtcttcttcttcttcatgtagctcagtcccagttccagaatgaggaagctgcctcagggtcgccctgttcctccccttggacctgagacaagagtttctgtagtctgggtggaacgctatgatgatataggtactgtatgaggactttgtccataaataaaatggcaatatatgacagtgacttgctaaatgtctacagggagtgggcacataagcctggtgtggccaggagctagtcctggagttcagcaagccttggtttgtaccccagctccactactcagtttctttaagccttagattactcctctgttaaatcctggtacttttttcatagttgtgaagattcgatgagaccagtagatacaaagcttttggctattcatgttggcatcacagtcagtggtttgttgccagttggtctcagtcatcccaggacctttggaaaggggaaggggaagcacttcacttaccctctctccacccacatgtcctactgtctcgttttagtataaagcttaatttgtccttaagagttgcactctgggtaagtttctcatgatttttacataagcaacattagagcattagaaatatatacttgcctaaaatcccatccagcccagagtttgtgggaaagtgtgatagttacttttcaaccaagccctcaaagatcacagaacatattttctaaaaactctttgctttagatgaaattagctaaaaaatgtcttgagagagaattttttaatttgtagagaataattaagatgatatttcaggacagcacagtccatatatttgccactcacttatgtaaagcgattagaaaattagatttcctattatctgtttgggaaaatgagggagatattaattgtaatgctattattttcttccagaaaactttcccctctcagagctgatgacagagatcagtactggtgtggaaactactgcaaatagtagcacttcactgaggtacactctatttgcttgaagttcatcagcgtgtctttttttaacatattgattgcagcttaataaataaggaattatgaaacgaaagagttgtagacaactagaaataaaaacaaaaaagatcaaagaaagaagtttgtatacaatgtacaaggttatcaaattattatagcatggatttttttaaaaccactttattgaagtataactgattgacttgttaaaagctatacgtatttaatgtatacaacttgatgagcttggagataagtatatatgcatgaaaccatcacagcaatctattcctgaacacttctaccatctccagaagttttctcctgcccacttaattcattattattattattttgtaataagaaccacttaacataagatctaccctcttagcaaatttttaagtatacaatactgtattattagctgtagccactgtactatactgttgatctttaggacttatcctgcataactgaaactttataccaccttttggctaatacctccacatttttccctccctgcagttcctgacaactagaattccactctctgcttctctgagtttattttagatttgtcatataagtaatatcatgtggaatttgtctttttgtgcctgccttagcgtaatgtactctagattcacccatgttgttgcagatggcaggatttccattttaagactgaataatatttcattgtatgtgtacaccacattttccttgtctattcgtccattgatggatatttaggttgcctccatatcttagctattgtgaagaatgctgcagtgaaaatgggagtgctgctatctctttgagatcctggtttcagttcctctggatatacaccctgaagtgggattgctggatcatatgaacattctatttttaatttgttgaggaaccatactgttttccacagtggctgtaccagtttacatttccaccaacagcatacaaggggattcccttttctccacattctcgccaacacttgttttcttttggtttttttgaaaataaccatcctacctggaatgaggtgctatctcattatgattttgatttgcatttccctgatgactggtgatgttgggtgctttagcaggagttttaatagtataattaattgctattttacatttatctagagcaaaaagaaaaatggagaagtagaggcaattaaatattaataaagaccgtaatagtagggcagcaatattagattgaaataatggagttaaattggccaaaacagtgtggccaaatagcagttaaaatatcctaaatcatatgagctaattaacggaaatatgtttctaagcaaaatgtaatactttataattgggttaaaatttgttttacctgcccatacacaagaaggataaaaagagaataatctgattctaagaatggtaacaatgtatttgtataggctttgtagttttcaaggtttgcttacttgtttttggtttataactctaagagttcaacagttattttctgttttactagtgggataaaataggctcaaagaggttattccttagtatcacacatccagtaaatgcaggagaaagctacctgaatctaggcctttgaccccaaatgcattgaccctgcatctctctcatcacagagctaccctgaaacttgatattttaagttccttttagttatgtgagctgattcaaattgcatataagatgaatttattctaatattgttaggtgattgttgttgaagtcagtaaagatgatttattttagcattatcattttaaacttctaaaagagggcaagtcattcttaaaacttccaggttttatatgctttggtgttttaaaacaaatcacagatatcttaacgttccaaatacatcagtatgcatctgaaaagtaagaaacttttcagatagctaaacaacatcgcaataataaagttagtaatactttcttaatattatctaatagccaacattcaaatttcttcatttttactaaaatattcttcacaattggtaaagaattcactccaggactatatatctggttttaattccttcagtctcttttaatctggaacagtccttttttctttatgacactaacttgctaaagaagagactatagaatagtcatgagtagacttttctggaactaattagaagagacttacttatcatttactgtctttgttgttttcatctttttttttttttaatttaaaaaaacaaaacaaaactgggcacaaggtatcaccatgttacccaggctggtctcgaactcctgggctcaagtgatcctcctgcctcggcctctcaagttttcatctttttaggtcaaaggttgtaatacaatttgacagtaaaatgtatattttattggtagattagcaaagtttataatttgtcttggggacagaattactcaaggattgatttttctttttttttttaatgtcttgaaagattgattcagtgttgctttggccaaaatcaccttacctatatagaaagaaaattcattgggttgcaaaaagaccccaacatgtagcatcacaaataacatgtaatattagatgggttggcctatccctggtgtgtaatgagtaactcgcccctccataggagcagttgccaactttagcatctgctgccttgccagaggctgtgagggctttggccctgccacagtgcggccatttatcaccatagccgagaaggacatttgcagctggcttagattaatggctctcccaacgtccttccccaccctgaaaaaaaattatatcggggattcctgtcatgggccgaagctgtgttcctgcttctcctctgggattatcagccttgactatgctgaaattccttgtactctggccggccacacttttgttccctataagaagaggaactaaagtgaaagtcccatagctggttgctaaattcttaactccatgcagcagagtactcttggcctctccttccacccagtgtccctattggttttccaagcatatatattttttcagctcctttctgttagcttagaaagcttgacccagtaatggacctttaggaccagatgttatagggggtagcagcatagattcccagaaagcagattctgagcacactgaccccttggcttttctcagaccactgccaagcaacaggtccctttactaatcttaggctatatgtgggggacttcaactcttgggtgtctcggggacttcaactcttgggtgtctgagataacaattttcttttcttaagatctacaactcttgaaaaagaagttcctgtcatcttcatccaccctttaaacactggattattccggataaaaattcaaggagccactggaaaatttaatatggtcatccctcttgtggatgggatgattgtcagcaggcgagctcttggtaaggtcttcatatgtggccgaagagttaaattttctttttctttatcatttttataaaccaaaaagaagtaaaaataaggaaatggtgataattaatagcttccacatgtaggaaatggtatggctcttgttaaaaagggagcatgtttcgttctttttaaatctgtccttaatctagtaagtgtaagtaaaacctcactaacttctagtattaaaatattgaagatagctgtttgtaatccaggacagaaaataggtttttagaatagattttgattctccttttccttgtcattgtgtgtttcttctgacagttttatcttagcactatgtctatctctctggggatgggaagtttgcaaattgaatgaaatagttttgagtatgcggagaatagttcacctgaatacttacagttcacctacgtaagtgactagtttctaacgtttattttaaaactctctattttcaaggctttctggtgaggcagactgtaattaacatttgtagaagaaagagactggaaagtgactcctacagtcccccccatgtccgccggaaacagaaaatcaccgacattgtcaacaagtaccggaacaagcagctggagccagagttttatacttcacttttccaggaggttggactcaagaactgcagttcttagaccactgaatttctaagactgttgaactccagtttgggaactataacacagcagaacagtttgataggtgatcactgtaaaaataaaaacaaatcactcccaagagcttactgtttaatcaccagaatagaagaaacacattataacccatttgatagaagactttgggctatctagtgaaatgggctcccagacacaatcacactcctgctgataatgatgatatacattttagccataaactttcttttaaaagtgacaattttagttaaacataagccttttgaggagaaaggcttttatgcatctcagttaaacacgtgcattggtagtatcaacaaatttgcaatatagaagttgaagatagttttttacctcactttttaggaggttgtattcaaaattaaaatctcagaatcttacaggacatttaaagactcatgttgatagcatggaggagaaggaaagaagtcacagccttctactcagttgtaggtcttcttgtcatccagctgtcacactgacaaaaagaaaagatgatacatgttttttgctcagataagaagcctgacattaaaagatgtcatatttttttctccacatttcaaaaagttgtccttctcatcactgcacagatctgtctgaaagcctcagtttctgagtgacccaggaacagatcagaaatggagcatggccttgtcctttaatggggatgcaaataaagtttgtggggttaaaagttataagacagcagtgataccccactctctccattattgtccagcggggtgacataatgacaggttaaatatttgtgattcattgattaaatattatttaaagaaatgtaaattcacaataagggttgaaaattatttggtttcatccattgtctcttatttcaggaccaagcagcaaactgcagtagtttgtgaaggattctaatatggggttcaggaatagcctctcaacgctactaattcagatctctcccagagaactactggatttcctcataattgacaaacatgagtgaccacctctttgggtggctactgttagaaatggctgttgtcatgttttctggactttgccagccaacagatccctgccaggttttggaaatacttctattacctcgctgctacttttctgcagggataaaacttttgaggtggccagacccagaacatccaaggattcctgttacagtgctacagtatacactgctcatttatcctattctcatgtgctttcttctttagtaagattattttaagaaaataagtgatatttaaagtccaaagaggaatgatcacagttgtataaggggtgttttcccacttgaactctgatgtcagtcgactgtgggtcagagctacaaccatctgtttggtttgatgttttggtggtttacttacggagtggggatagtgtgagacctaattccctgtgcaaatgtctcttattccagaaatgtgcattttgtcatctataagcaagaaatatgggcatagcagctcttggtttaaagtttgccataacctgttcatgtttgttttaagctcaggtaaagataacctcctctttctatgactccagtttccattcaggttatagtattattcaatagttgattttctttttaagctgggcaataaattgatgtttccagatggtaacatgggagagggcatataggataaagatgagcaaattctaccctaaaaatgttctagtagttcacaggaagaagatgaggtttaataactttcaaggtaattctagattgacattttgaggggaaaatgggctcttgttctagttgaagtgagcagagaaggctataaattaatatgtaacttacagcattccagaggttaaaaataactgatgcagatgtacttcttcagtgtgattcttcagatcaaacttttacttttggcatagttaatttcagaaaaatgtgctgtatgtgtgtgtgtatgagggttggtcttgctgatccttcagttagctctaaattctggcaactccttgtaattccaatgtatttgatacatgaacaatcatgttgaatgcatttgtgatctgggagacttcctcgtcttccagggaaggaaggatgtgcagcccctgaaggcatgaaactcccagtgtgtacggagccagtggaatatgggatacccataccttaccaggcgctggttccttctgctcacaataacatctgcccaaagagggagtgggaagaacgcttagctctttcactagtatggatttgagttcatggtcactatttttacccacctgcctttgttaaaaatcactttgagtagaatagcactggaggaacatatttagcacctaatattaatatttagtagtccattgataaatttgccagcatatgttctagcctctggggggaaaccaggaccacttttgtctgtggcttaaacagttcagttgctatatctgttgggtatgccgggggtggatgagtgtggcattccgtgaagaggaaggtggtaagtaaggtttcccttctactgccttcttaagttgcaggagggagcttttctcctcccctctggttgggagcactgaggacagtgaggagggcttttaccttgttaatcctttccttatttagctagctttcctttttgtctagggcttcctcttgagaccctcttccatccattgggcctttgaaaggactaatcagacacacacacacacacacacacacacacacacactcgcatactcatgcacattttccttcatttccagatcctttatttcagagcagcccattttcctctggattcattgatgaatacaagtacccacacctttggccagtaatgtcagttacctgctgcaggttctgtgtatgaggccttcatgaacggttaccttctccatacactagggaagcatttgtcagactctgcagactgggttctagagaggcagagtctttaagagtattcatttcttctggaaggtggagctttacccaaagtggaagttagccttgctcaaagatgtgttttgtggtaggtggtaaaaataaataaataaataaataataaaaaaagaaacatgtattggaggtaatttgacactgctgctggcagtagttctctattcaccattttaaagcccattcaggttctctcttcctgaaaagaactgattgctgtgtttacatgaaatgacattggagtcagatggtctgttttaaagatttccatgacagcctcttttcctgagttggagagattggaggtggtctatccgtacgatgtggaatcaaacggtgggtttcttagtagctaaagaagccatgtacttctagtgtgtttctcagaatatcaactcatgttcttcagatgcttttctttttttaatggtgagggaaaaggtataatttgggattccacagtgccttgcatatagtaggcgcccagtaaatacttgttgaagcaaaccaagtttcccaagtcctcatctcttatagtgaccaagacatctttctcctctgaagggcttggcagttgtggctaaaaaataagcagtatcattatttgcttgaaatcatatatacagtttgtatgaatttcagtatgttgccaagacatgattttttcttattgtattttctgtaaatatttctggcactgaactgtaaagtaaaggcaaagtgtaaatatgaaggcgtgcccgtgccccttgcctcctgtgtttcatcttcgtcggttagggaagaaggtccagaggtttgtttgtatttatgccgatcctttgtccagaagaagcccatggaatattgaatgtaatacatttagtcaattaaattttaaggagattcttatctaataactttgtgtgtgcttttggatacaggctgaggctttactcctacactggtgctgttaattttaccctttcaggggatgtctgctcggctttggctgccctttataatttagatctgtagtttaaatgaacattaaatgagtatttcatgaaatactcaaagtttgattaattttaagaaaagtatttggccttctctgctggaaggagcttgtataattaaaacactgccaatagaggctcacctttcaggggctgcgaattgctgaggagatagatgcttatgttacgggagcaagaaagtgccagctgtgccctctgcttgcagaaaatttgagccctagtaggactagacagtcaggaaaggggggaggtgcagagatcatcccctgccgcccactgccccctttgtgaagggcatcttggagccagatgagtgccttcaggcctggatcacacatagtggagtgaatggaccacttgaaacaatcatgagaaccattgtggccatgcctctgccaagagctgctgacgtgtgccctctgaactgtgcctgggagctgcctaccttgcactgtgtgttctgcctgctctgcccacgcacaacaggacctccagctgggcctagtggccagagacgctgactgcacagtagccctgttttggtgtctggaaaggttttgtagccagaaaaaaaatgtgtgctcaagcctttcccagctatgctgctcagctctctctctgaccgcagccccttcaggacccagttccagggaatcacccccaacccagaccacctgctcctccttctcttggcctctgggccctgcatcaggagcaccctgccagagcactgctcctcttggacactcattctagtccattttcccagacttcctcttgtaggaattctggccttcccacagctgggctaggactcttgaaaccatgccccagctctcccagcccctcccatgctcttattttttcctgttgctggccccatgcgcccttctccttgaatcggtgtcttttcctataagggggttttctactccatgtttttccctaagtttaccacccccttcctgcagctgctcccccgcctggacctggtttgccttttcaacaggtgcttttaagtcatgagatgctgtagtctcaaaatcaagcctgcatcagaatcattctagttgcttatcagtgtgttgaatcccaagccacacccccacccccaagaggtctgaggagacgaaggtgagcctgggaattggcatgtttaataaatacactccagcacccacccacctgctggcagtcacaggcaggtggtccaagggtcctcttggagaataccatgcagcagccactccagtgggaagcccgaagcctcctttctgccatggtctggcacatggaggtttactgaatacttgatgagtgaacggatgacagataggagaagatgaggatgacatgtggaagtgttctggccactcaggagataaaggaacaagattcaagtcgttagaagcccctcactgaaaaccctaataaggagaggcacaagctttcagattaagtaataatcatttatagtcatttaatctagtaataattagaataatctactatgtgttagattttaaaagttttcagtggcagcccagtgaccaatccagcctggcagacgttttgtttagccaacagtgctttgacaaggtctgatccgacattttaaacttgggagatttcacagaaatccagactttttgcctgtcttgggaaagttaggagtcctgcaataatggacctgcatttcacttgtagcagttattggttggagctgccatcactgcatgcttaggatgcagtaagctgcatccagtttgccgcagtccccagcacccccaccaagtgtggacgtgggcacccacagctggtattacaggacctggggacccagctggctcctggagggggtctgtgacttcagatatatgaacaccgatcctgggggtaatttttgtcccatctatttttctaacttaacagaattatctccatcttacaagaaaaagggtcagaggggtgtcatgaacccaatagctactggactgagattcaagcccaggcctgcctggaaacctgggctttttaattctcagccagactgtctgtctcactgcctcacttcccaccctttcatccagaacagctctccctcaaagtgtcccctgcatgctttgcctgaagtacactgtgacttctttgttatgtcacagcttagtcacagttgggctgagagcagagcatggcccagcctgccaggtcccatggggcagccctgccagcccagcccaggctggcccagcttagccacacatgcgccatgaagtaccctttgatgccgctggtgaacgacctcacattttctttcctggttttctggttctgcctccctgtgggtttgctgttgttattgatcatctggctacgcttcttacttagccaaggtgagcttcttaccccgtccaggcaggaccctaatcctggagctaggcagggggccaaataggccagtgtgtcctgaaacaactgcagaaggggcttccttcagtcattttaagtgctcgcttagatacaagcagtcaactcttaagtggaaaggattggtttggttgtttagggtttcttaacctagagttcgagagtgagtcctagagtttgaacctagagttcgagagtgagtcctagagtttgaacctagagtttgagagtgagtcctagagtttgaacctagagttcgagagtgatcttttgaacaaatcagaggttatcgctccaggcagatgaacttccaggtgcccctttcagctggggtgcaaggctctgtgagcagagcgtgggctggatttcagccccgctcaccctctcaattggctgcttttgtgcagtaaacagcttgcacgatgggatacagcagccttaggcatttttcagatacctgcagaccactcactgtttctgcctaagccatgtatcagaaaggatctggctgctttgggagacaggctcatggaagccagctgacattcaccctgacctcagcatgccaccaagaggagcaagaggtgggacgaagctggctgtggaggaagctgggggtggctggatcaggatatggcctggctgtgtggcaggagtgggacttctgctcctctggcatgtgtctccctgagcatccccttcagcaagaggtctcttcctgctggacacagtggctcacacctgtaatcccagcactttgggaagccaaggtggccaggttgcttgagcccaggagtttgagaccaggctgggcaacgtccctacaaggaatacaaaaattagccaggtgtggtggcatgcatctgtggtcccagctactgaggaggctgaggtgggagaattgcttgagcctgggaggtcgaggctgcagtgagccgagatcacaccactgtattccagcagacagagtgagaccctgtgtcaaaaaaaggcctcttcgtggggaccacttgacctcctacctcctgctgctgagtgccatgacctttggcaagctaggcagggagggcgcagcacatgccgccagcaatggtcagatgttgttgaggcagggtgagaagtccctccccacacccctgctagccccatgatctcaaatgtaggggcttataattatgtaattattgggagttcctggcaagaacttgggatgtccttttgtttctagaaagtgtttatttaaagtatattctcctcatagtcctagggtagaccacagccctccctgaggggcacggtttaggcattgggccccacagctggtagggagtcagccttgtttgcatactggcgataaaagttgtctctctggagtctggaagatatgagttcagatatcatccttttttttttatttttattttttgaaacagagtcttactcttgtcagccaggctggagtgcagtggcacaatctcggctcactgcaacctctgcctcctggcttcaagcgattctcctgcctcagcctcccaagtagcggggattacaggtgcccgccatcacacctgtctaatttttgtatttttagtagagatggggtttcaccatgttagccaggctggtctcgaactcctgagctcaggtgatccacccgcctcagcctctcaaagtgatgggattacaggcatgagccaccgcacccagcctcatccttgcttcttaatagttcctaataatagtgaacctgtttggaacactgactatataccagaccttgtgctaaacactggacttgcataatcttatgtaatcctcataataaccctgcttaataatacttaataatatcacaattggggaaactgaggctaggagaggagaagcaacctgtccaaggtcatacatctgtgaactacttaagagagccaattgtctgccttcaaatcctgactctgccacctaccagctgcatgactgtggacacctctctgagccttgcttttctcatctacaaaatggagacaacactagtacctgccccttggggttgtgacaggcttcagtggtcgatgcatatcgggtacttacagggcagggcacacagtacgcatacacacctggcacatcgtaggttcctgtaggctgagaaaatagtccagccaatgctggttttgtcaatgtgggaggaaatgcaggtggtgtggctttggatgccttctccagagaggagacatttctcctaccacccaggccaaggcctgcagcatgagtctcctccagcattcactctgcttggaggcccaactccaaaaccatccacaacctaccccactccaacccctccgcagactttctcctgagaggctgtttactggtgtcatgtggcgttttgaaataagtcatttgttaattttgcaacgaagagaaaccgtccttaaagtgaggtgggcattcctccctcaggttctccgtcttctaaaactcccagtattattgtgcgtgttttgcccttgtgctgggaactgacccaatgtcagggtttggggggctaaggggtcaggacacccagacctgcagttttctattctgctgcagatccctttattggaatcagtttgcctgaaatccagtttgaaaagcagacaggagtagctctgccgcctcctccccaccaccccccaacactcctgctggctcctcagggcagtttcaggcctcagaatacagagggttaagcgtggaatacccgacaggatgcactttcccaagtcgaaggaggagcaaatggggaggaaaggagagctgcctgatgaaactggcactgaggcaaaaatgataatgggcagctcaactcctgcagaagctggtcagtggggacagtgctactgtctggccatgacatggccataaggtggaggaagccacacacacccttcaaggggaagatgccctgctgccggcattttccttttgcgatttgaaaggagtttgcagaaggatgaagggaaacctccaaagagatgggtttggggctgaaacagaagagtggcgcaacaacccctcatggtgggtcttggagcaagatgttcaattcaaagctgcctttaaatcctctgagtccaaacacacccaatggaaccgtggagtggggaggctgaatttgcatccagtagcaccactccctggctgtgagcctggacaagtgatttcaccatcctcatctgtaaagtacaaaaaatactagtaattgacttcaggaaggtgttaagaggatcagatgagaaaatgaatgtaacaacactttgcacatactctatgttcaaaaaatactctctctagtgaagaacagtcacttcacgctatcctactgactttttttttttttgagacggagtctcgctctgtcaccaggttggagtgcagtggcgcgatctcggctcactgcaacctccgactccctggttcaagcgattctcctgcctcaacctcctgagcagctgggactacaggtgcgcaccaccacgcccagctaatttttgtacttttagtagagacggggtttcgccatgttggccaggatggtctcgatctcttgatctcatggtcacccgccttggcctcccaaagtgctgggattacaggcgtgagccactgtgcccggcccctactgacttttaagacatactaactgccaacactgttgaaggcctgtgctaagtcctgtgctgagttttacatgtctgccttcggttaaccctcatcctagaagatgctgatattatgcccattgtacaaaaacctttgttacttctctgcaactagtgaaacaatgcaagagtttagtaagaaaaataatcttccccatccctctttttttctcaccctacctccccaagatgagtctgttagcaaactcattaacgtgtgcaggttttcaaaacaaattggggaatggtgcagcatttgcttttcaaaacaaaaagatcctacatttctttttaatttgcttataatataccgtagatattctgcaagtcagaagatacagatatgatgcaaacattttaacagcttcatgacaagccatcagacggagggtccgggtctccatgtggtgtgactctcccacagcttagtcacccagatctctcgtgatctgtggacgtggacacagtttccaggtgttttattgttcgtgtgtgcgtgtttcatcacaaaacagggctacagtggagatcattgtgcctttgtactcagatgtttgttaatgaatgaactagtggactagtggcctggatgggtcaataactgtgtctcttcactgcctcttcctggaccatgtccagtacagtatgtcatttgctcacctctgtgtcctcccctctagatacggccattttccaagtcacaggagcagccttctttcttggtccctggtcaccctttaaggccctgaagtcttcctgaggcctcaaggctggctcataggattctgccttggccctagcctcaggcaaggctgcagggatacccaggcctggcaggggactccttcctgggtcaggggtaggagacaggatgtgaccatccaagaggccttgcctcgtatctccacagattcagaggaaaatgactccagtgtgtgcttggattgggagccctggagcaaaggcccagctgagttttgctggaaggggacactccacggccaagagaaggagaggccctgctggtgagcctgctgtgccaggtgaggcccttccaggggccagggggagcctcaaggcccacccaaagccttgggcagctgctatgtgggcaagaggctgcctccaccatattagaggtatgctccctggccatgctggatgacgggttctctccagcatgtgagagccttctgcttcattgtgggggagacctggtgttgccctgttaaagggccagccccctgtgccacaaggagcctttacaaaggtcccctaccctttaccctagggcctcaccccccaccactttcctgatggtctttggccagctgttccctcagacgtctgcgtggggcactccctcccctctgagggcttgctctaatgtcactttttcagcagagtcccactggccaccctattcgatattgaagcccccaccctatcctccgcatcgtgctgcttaccctgctctgctttcctttcactgtagtacttaccgccttctaacacgtttgatcgtggctgcatccaaagccccaaaatactgccagacacatgctagaggctcaatacatgtttgtggaaggatgacatgatattattattattattattacaatggctggtatccttgggggctcaataggtaccaaggcctgtctgaaccgttccccttccacaagcttacttatgaaatcctatgatgaggatatgattctcacctccatttacaaatgaggcacacacacatactctcatgtgaggtgtcagggcaatcagatgctgtacccaaaggcccttgcacccattgaattcctaggagacctcagccattccagtggggttagatgccatctctataccaatggccccaaaatgtgtgtgtctcatctaatctcctcccaagctttattatctgtctgcttgacaccctctcatgcctagaataggaatcttgattcccattgtcacccagccaagcaaaacagcaccctgatcttctgctagcttttcttcatctccatgaatagcaccactgtggattgattctgttgcccgagtcacgaacccgggagccagcctctcgcctctctctcccaactctaatctccatctctcacgtgtccgcctttctctgccctactctgaagttggttcatgcagtgtgttcactagcccccgaccctgtctgagtggagggaggaggtggtgaaaaggagggcccctcacttaacctaagttgtaatgattttttagccttttgggtcccaccttgaccactgagggcccttttcccaggaaaactcctcctatgaatgccctcagagatttgtgtacggggccagctccacaggtgtgtaacctgcagtcccacaaggtcccaggcttggtttcatgcttggctattgctgtcttgaaattcttaatttttgaacaaggggccccacgtgttaatttgctattgggccctgcgaattatgtagcttgatctgtttttatataatttgtggcatgagaaaagattttcggacgctgcacaagaaccctatcccatttatgcatagcccttcccttcccacccccatcacttacccacctctttctttcttttttccctttttttttttttttgagacggagtctttctctgttccccaggctggagtgcagtagcgcaatctcagtttactgcaacttcttcctccccagttcaagcaattctcctgtcttatcctcccgagtagctgggattacaggcacatgccatcacgcccggctaatttttctatttgtagtagagacaaggtttcaccatattggtcaggctggtcttgaactcctgaccttagatgatccacctgcctcggcttcccaaagtgctgggattacaggcatgaaccaccacgtctggccttacccacctcttttttctcatcccaatggcatccctagtcccaaccttccttttgtttctagtttggttttcctggagtcagcagggcagtggcaatggcagaagtggatgggagagacttgccagggaggcaagaggactttggcaactgtggtgcctccctggaacccccaactcatctcctcttcagaccgacatgtgaaagcctccagaggtcccagcccttctccagcatcacagatgacctccagccctgcagggagccgctcaagtctgggagggcatgggagcagtgagcaggcccatggggagaaattggccaatttaattcagaggggtcttaaagcagggctgggccggagggtgtgggtccatattaaagaagcaagggtcttcccatacccgggggacccctgacaaacctaccaggcctgaccaagtcattcattcaaccagcgtaggtccgagactcagccctggccctgattcaagccatctaggaccttcttgggaatgcccaaccctcttccatctgttcaatggggatggggggcttgctctgaacttccattctctgatttcaaattcgctccttgattggacttcaggctgatcttaataacaaatatttgataaatagctgcagagtgtctaccaagtgcctagtttggtaggagcaggaatagctataggagtagctcaacatttagtgaatgcttactacacgtcaggcacttttctatgtgctttatacatacgattgctggccgagcacggtggctcacacctgtaatcccagtactttgggaggccaaagcgggtggatcacttgaggtcaggaattcgaaaccaccctggccaacatgacaaaaaccccatctctactaaaaatacaaaaattagccaggtgtgatggctcacgtagtcccagctactcgggagactgaggcacaagaatcgcttgaaccagggaggtgaaggttgcagtgagctgagatcgtgccactgcactccagcctgggcaacagaatgagactcggtctcaaagaaacaaaaacaaaaacaaatacatacgattgcttttagcccttgtaagaattctgcaaggtaggttggttacctctgttttacacatggggaaacaggcacagagcagttagtaagttgctcagagtcacactgggagagttggcatttgaacccaggttccatgactccagaaccaggtcccactccactgtgccagttcttccccaggtggggtgctgggggaggtatggtgggaggcgtaagtttccagaggctgcaggatgatgggggtggggggataaagggacaggccctccaaggtaccaactgggcatcatctttatcccttctttctctctcactccacaccccaccagccaccacgacttctaaatgtccaaggagagagaattgagcctgaaatcttagcttgtctcctggcctttggtctcctggccttggtctctgctctttctgccctgttggagtgatccacccaaagcacaaattgggacatgtcccttcctggcttcacgtcttccatgctttccgttgtccgtgggctaaagtctgagctcctcatcaggtgcagaaagccaccttttgggatttgagccccactgaatttgctggatgaggtttctattcttacccacaggctacaatgaacactcttgaacctaaatccttgcccacaagtgtgcttctatccagagaacacattctgaaaggagaaattgttgaatataagacatgcatttacattttgcagaaactaagttgctcgaccaaaaagtggccccaagggtacattagaagtacctgtttccccagtcctttgccccgctgtgcaatcccaacatgctctcttacatacagacacacacacgcattatcacacactcacacacaccctcatacacacactctcatagacacacacagacacacaccctcatacagacacacatacacacacacaccctcatacagacacacatatgcacacagacacacaccctcatacagacacacatacacacactgtcacacagacacaccctcatagacacacactgtcacacagacacacatacacagacacacaccctcatacagacacacacatacacacacacagacacaaaccctcacacacactcatacactcacatacatatacactcacacacaccctcacacatacacactcatacactcacacatacatatacactcacaccctcacacatacactcactacacccacatccacatgcatacacacacatatgctctcagacaccctcacacatacacgctatcacacacagacacacacactctcatacactcacacacatgctcacacatatccactgacacaaacaccctcacacgtacaggcacactatcacacacagacacacacacacactcatacactcacatatacacactgtcacacagtcacactcatacccacacacacatatacactcactcatacagacacacatacacacaccaccttatacacacagacacactatcacacactctcacagacacacatgcacacacgtattctcacacatttaaatattttgttttccatcaggctgtggctttgaaatgagaatgagaaggaaacctgggctagacacacatccatagacacgcgcactcacacacacgcacacacacccacaaccctcccttctccacacaagccttgctccagctgatgagcttttgtcaccacggggttttcctgggagctgcaggggtggcgttgaatgaaccctgttggcaactcctccctgtggtggaagctctgcctggcattgtctgcatttttgccagatgccccgttctgtggagtctctgtgcattgcttactcggccctgccccactgtgctgtgaggggctgctgggccattgttcagcctcccttctggcctagaaaagccagcagagccccccagccctcttgccccacctgctgaggaggcaaccccgaggagagtgagtgcagtgggccctgcactggggtctggggagagcatctgccatgcccctggaacctttgaggcagaaggcagatgaggccgctcctcagggccccgggcaggtgacagctctggagaacaattgtggggagtgtggggagacgccttccctgctttggtgagggctgagaccccgggcctctacggatgtggacgaggtccccattctggcacacacagacacacacacgcacacatgcacactcatacagaggagatgggcatgtgactggtaaacacatcccatgacactctagtcacaggctcccgagagacatcatccccacgtagcagccacggctgagtgcccatgcattatcccactggatcctcacaacagccctctcagtcgcgtcatggttccattttcagacgaggaaactgagattcagagaggttaagcaactcgcccaaagtcacacagccatgaagtggctcatttttctgactcttaactgggatgtgtgtctccagatccacggggatgcccctggctcttcctagagctgaatgatggagcttaaggctgtgcggttgatgtttgtaggaaactcaggtgcactcgggaccgcaaacctgtctccccaggctgaggggcgcagggaccctgcgaggacagtcaccagcatgacatgggagcaccgcaggggcatcagcaaagcagggtgtatctgactgtcggtgcatctcattgaaagccacaccccttgtcacagcatatcttctaggcacaggcttattttctacccctaaccctggggccacaggcctggactcccgagtgcaagcccatcaccatcccattcagcctcagtgtcatcgtctgcaaaacggccaatcccctctgcatttgcttccaggagctcccatgacagagtgtcacaagctgggtggtttagaacaacagaagcgtgtgggctcttacttctgggggctagaagtccacagttatggtactggcattgccaggctccctccaaaccctgcagaggaaggagccttccttgcctttcacaggttctggtggctccaatgtgcctcagcttgtggcagcatcacccagctgcggcctctgccctcacatagtgtccccactgtgtgtcttcccatcatcttcttgatatgcacacctgtgtcggggaccgattttcccctttcagagggacaccagtcttattgggttagggcccaccctaccaaccacattttaacttgattatctctgtcaaaaccctatttccaaataaagtcactttcatgcgcgtccatgtgaagagaccaccaaacagcctttgtgtgagcaacagggctgtttatttcacctgggtgcaggtgggctgagtccgaaaggagagtcagcaaagggagatgggggtggggccgttttataagatttgggtaggtaaaggaaaattacagtcaaaggggggttgttctctggcgggcaggagtgggggtcacaaggtgctcagtaggggaatttttgagccaggatgagtcagaaggaatttcacaagataatgtcatcagttaaggcaggaacaggccattttcacttcttttgtggtggaatgtcatcagttaaggcaggaacaggccatctggatgtgtacatgcaggtcacaggggatatgatggcttagcttgggctcagaggcctgacattcctgtcttcttatattaataagaaaaataaaaggaaatagtggtatagtgttgggacggtgaaaatttttggggggtggtatggagagataataatgggtgatgtttctcagggctgcttcgagcgggattaggggcggcgtgggaacctagagtgagagagattaagctgaagaaagattttgtggtaaggggtgatattgtggggttgttagaagaaacatttgtcatttagaattattgatgatggcctgaattgtcatttagaattattgcatgaattgaaaaactaaacggaataagagaaggaaaaaaacaggtattaaaggactaagaattgggaggacctaggacatctaattagagagtgcctaaggaggttcagtatagccttgccagcaaagattatttatttactttaagagttaagagtggcggtttggggatagcaccaggagatatcagctgtgatggcttgaagaaacagtgtaaactggcagtgtaaacaagagcagggcatgtatgagtagttgagaacagtgaataggagtatgactagatagtagggatgacaagttttttggggcacagtccaagttggtctggtgtctggaatgagactggggcctaataaaaaggagcgtccatgcagaagctcaaatgggctgtaccctgtagcattccgaggacaggcctgaattctgagaagggaaagtggtaaaagtattgtccagtcctttttaagttggtggctgagcttggtgaggtgtgtttttaagactattagtccgttctacttttcctgaagactgaggaccttaagggatataaaggtttcactgaatactaagagcctgaaaaaatgcttggctgatttgactaataaaggccggtctgctatcggactgtatacaggtgggaaggccaaacagaggaattatgtctgacagaagggaagaaatgaccgcagtgaccttctcagaccctgtgggaaaggcctctacctatccagtgaaagtgtctacctagactaagaggtattttagttttctgacttggggcaaatccctgagcttgatgtgtagggaagggagggggcctgaataatccctgaggagtagtagaatagcagatggaacactgagaagttatttccttgaggatagatttccacgatggaaaggaaatgagaggttctaagaggcgggctagtggcttgtactatagcatagcctgccttcgctggtgtgtggcgattaggcctggtggaactgccatcaataaaccaagtatgatcagggtgagaaacagggaagaaggaaatgtggggaaatggggtgaacgtcaggtggatcagagagatgcagtcatgagggtcaggtgtggtatcagtaataatgtgggaggccagattgaagtccgggccaggaacaatggtaattgtgggagactcaacaaagagtgagtacagctgaaggagccgcggagcagacagtatatgcgtcaggtgtgaggaagaaaacagattttggaaattatgagagctgtagagagtgagttgagcatagtttgtattttaagggcctctaaaagtattagggcggcagcagccgctgcacggagacgtgatggccagcctaaaacagtaaggtcaagttgtttggacaaaagggctacagggcgcgatcccggtcgttgtgtaagaattctgactgcacagccttgcacttcggctgtgtgtaatgaaaagggctgggataagtcagggagagctagggtgggggcagtctctaaagctgtcttcaaggaatggaaagaggtgtggggaaaggatttaggatttatggagtcagctaggtttccttttgtgagtttatataatggtttttttaggatggcaaaaccaggtatccaaaggcgaaagtatctaaccatgcccaggaaggaaaggagttgttgttttgtagaaggggttggggtttgagagatcagtcagacacgatcggcagggagagcacatgtgtttttatgaagaattatgctgaggtaggtaacggatggagaagaaatttgagctttgaagggggatacttggtatcctttggagaataaatgctgaaggagcagaagtgtgtcttgttgagaagattcaaaagaggggcaacaaagaagaagctcatcaatatattgaataaggtgagaagcggaggggtggaaagaaagtaaatcatgagaaagcttggctgaagtaatgagggctatccctgaaaccttgcggcagcacagcccaggtaagctgctgggactgatgggtgtcagggtcagtccaggtgaaagcaaagagaggctgggatgaggggtgtaggggaatagtgaaaaaagcatctttaagatcaagaacagaatagtgagttgtggaggaaggtattgagaacaaaagagtgtacaggttgggcaccacagggcggataggcaaaacaatttggttgataaggctcagatcctgaactaatctgtaaggcttgtgtggtttttggacaggtaaaatgggggaattgtaaggagagtttataggttttagaagcccatgctgtagcaggcgagtgataacaggctttaatccttttaaagcgtgctgtgggatgggatattggcgttgagcggggtaaggatgattaggttttaatgggagagtaatgggcatgtgattggttgccagggaaggagtagagatgtcctatacttgtgggctaaggtgggggcatacgagaggaagacacaaaggaggctttgggttggggagaagggcagcaatgagatgtggctgtagtccaggaatagtcagggaagcagataatttggttaaaatatctcggcctaataagggaactgggcaggtggggataactaaaaaagaatgcataaaagagtgttgtctaagttggcaccagagtgggagagttttcaggggttttgaagcttggccgtcaatagttacagcagttatcagggcaagggaaacaggcccttgaaaagaaggtaacgtggagtgggtagcccccgtatcgattaaacaggggatggacttaccctccactgtgagagttacctgaagctcggcgtccatgatggtccggggggcttccgaggcgatcgggcagcgtcaatcttcagtcgctaagccgagcagatctgagaaggagtcagtcagacagccttgggctagagctttaggggctctaggagtggctgccgggcgagctgggcagtctgccttccagtgggtccttccacagatgggacatggcttgggagaaatcctgggctgcgggcattccttggcccagtggccggatttctggcacttgaagcaagatcctgatggaggaagtcttgtaggaatgcttgactgctgcggcttaggtgtgtgcggcttaggcattttgaagttcttgtgtgctggaggtgtggctgggttttgtctcacagcagaggcaagtaattgtaactcagacatgcgttgccgtctggctgcttcctctctattactgtacaccttgaaggcgaggttgatgaattcctgttgtggggtttgagggccagattctaatttttgaagttttttcctaatgtcaggagtggattgggtgataaaatgcatattaagaataaggcggccttctggcccctctgggtctagggcggtaaagcgtgtaagggtcgctgccaagcgggccatgacctgggctgggttttcgtctttacctcgggtagtttctctaagtttgtcagaattaccagctttgtaagctgcctttttaagcccttcaactaggcaggaaatcatgtaatctcgcctagctgtacctggggaatctgcctgatagttccattgggggtcctctcggggaactgctctactgccttcctggaggtcaagttcatgaagccggcggttatcagcgtgagattgggctagagaaaaaactctttcccgttcatctggggagagggtagaagtcaggatgacatttcagtcactccaggttaaactgtaggacagagttagatattggaattcctgtatatgtttagtggggtctgatgagaaagagcctaaatgctggctgatctgagagaggtctgacagagaaaaaggtacatgtaccctgactatgccttcagctccagccatctctctaagaggaaattgtgggtaggtggggaagagcggaactaaactgtaagccggaccgggtatgaggaagggaggtggtagaaggattatagggtggaggagtggaggctgaggaagaattgggacttagctcggcctggcgacgagcagcctggggaggaggggaagagtcagatgaatctgtagaaaaggaagactggaaagactcagcgacacttggggttgggactgaggggacaggcgggagggaaagaaggaggatttgggaggaatcgcattgggaacagagactagggagggaacgaagtgtgaaaaatgtctggatgtaaggcacctgggaccatttgcctatttttcaacaaaaattatttaggtcttgtaggatggagaaattgaaagtgccattttctggccatttagagctattgtcaagtttgtatcggggccaagcagtgttgcagaagaagataaggcatttaggttttaggtcaggtgtgagttgaagaggttttaggtttttaagaacacaggctaagggagaagaaggaggaatggagggtggaagtttgcctatagtgaaggaggcaagcctagagaaaagagagagtagagacatggagggaaggggttcgggggttcttaccttccagaaaagcgggaaaggggtcagcgcgcagaaataaggggttggggcacagagacaagaggttggggcacagaaataagggattggggcatggaaataagggatcggggcacagagataagaggtcggggtatggaaataagggatcggggcacagagataagaggtcagggcgtggaaataagggatcggggggttcttgccccccagaaaagcaaagaaggggtagaacacggagagagggagttgggggattcttgtaccccagaaaagtggtacttgctgctaagagtgaaggaccaaggcaggtgtccctgtgtggtcagacacctctgaaatgtgggtgaatgatcagagaggcatccctgcaatgattaaacaccaaaggaaggctgccttcccgagtccatgaccggtgccgggattttgggtccatggataaaacgtgtctcctttgtctctaccagaaaatgaaaggaattgaaattaagagaagggagagattgaagtgtggtgccaagattgaatggagaaagaggttgagggatagtgagggaggttggagaagagagtaaaaacaggctgcttagcggatttaaaattggtgagatgttccttgggctggtgggtctgaggacccgaggtcataggtggatctttttcacggagcaaagagcaggaggaaaggggattgatctcccaagggaggtcccctgatcctagtcatggcaccaaatttcatgtgcatccatgtgaagagaccaccaaacaggctttgtgtgagcaacaaggctgtttatttcacctggatgcaggcaggctgaatccgaaaagagagtcagcaaagggagataggggtggggccgttttataagatttgggtaggtaaaggaaaattacagtcaaaggggggttgttctctggcgggcaggagtgggagtcacaaggtgctcagtaggggagcttttgagccaggatgagcccggagaaggaatttcacaagataatatcatcagttaaggcaggaacaggccattttcacttcttttgtggtggaatgtcatcagttaaggcaggaaccagccatctggatgtgtacgtgcaggtcacaggggatatgatggctaagcttgggctcagaggcctgacagtcacattcagagctactggggcttaggcattcacatgtttttcatatgtttttggtaggacacttgaacccataacactctcttgagagtttatcatgaggattgaatgtggtaatgcatgtaaagctgtgatcacagtgcttggctggcacttcattccataaattacttttgaaagaaaaaattggctgggcatggtagctcatgcctgtaatcccagcactttaggaagcggaggtggaagcatcacttgaagccaggagtttgagaccagcctgggcaacatagtgagacccctgtctctacaaaacaataaataaaaatggctgagtgtggtggcacacgcctagtaaatcctagctccatccagagactgaggctggaggatcgcttgagcctaggaggtcaaggctgcagtgagctgtgatcacaccactgcacaccagcctgggtgatacagtgagagccagtctcagaaaagaaaaaggaagaagctgagcacctggaaattagatgctctatgtacattgtgtgccaggccccatttaagtgcttgatgtgtattatcccaccaaatcctcacaaccacccctcaagccaggcaaggttttcatttaaatgatgtggaagctgtgactgagagaggttaaggcatttgcctgaagtcacacagcctaagtggcagagctgaggatcagcctgaagcctatgaggctccacctcatcacactacataggactgtgctgtagtgtggagtgggggctgcttggaggggcagaaagccagggaggaaatgctgagcacacagcacacaggccctggggggctttctgggtctgagggacctggaatgagtctctgcgatagtgagaggcctagctgatggcaggctgcctggggaggtgctggcgagctgccagggtgcagggccaacaggtctgagccactccactgtgacctaaccggcctggccgatactgcaggtggggggctgggacagggctcagccgggggtgaggaatgttgccctgagcgtgggtacactcacttctccaggcttcattctgagtatacgcgcggctctcccggaagcgaagagggcacttccttacagaggcttgaaagtgtggtcatccaagattcaggccactctctcttccttcctgctttcttctgaaaggttccttgcacctaaggaaggtaacaatgaactatgttttcagtctggactagaagttcatttacccaggtactaacttgtttactcactcaagcatttattcattcattcactcatttactcttccccccattcacctaatggctcactgattcattcattcactcatgctctcacatattcatgcccacagccattcactcttccacctacccatccacctacccatccatccatccatccatccatccatccatccacccatcaaaccaaccatcaacctcttattcaattgccttcccattcatcccttctctcatcccccattttcccaaccaatctttcattctttcttccatctatctatgcatccatctatccatccatccacccaacctttattaagcacctaccatgtttcccacccaaaactccctatggctcccaaagtagttctgcacccacttcggctgacaattcacctacatattggaccccagctccttggcctcacagtggcatggttcccttgtctcctcctcaggaggaggctcaggagaagtggatgggtggtcttctgcacagccctggtctgcaggttccagccagtgacagccacctgaaacttggggtttttcaggaccctttgtgttgcgaggcctttcccgtctttaatgccagaaccatgcatgctcctgggctctatggctcccgtggggccctgttttcagtttcttggggcccatttcttgcctccctaaggccagaacagagcttcagactgtggggacccatagacttgggggccctccttgatgaggactctggggcctctcttcttggagtacaggtgaatatgcttcctggaaagattcactgacacccggaggcttagaggagggcagggcgggcccgggcaatctggggaagtctatggcattcagtcctggccagagggcaagagaaggggctcatggtccaaaatggatgcagggaataggacaccgccagggaagctggcaggagcgcttctcatacgttccccaaatgccctactgcaacaccttggcttgtgtccttgttggcacctggaaaccccttcccactccccaccctgacactcagcctctgctctcctctcagctgagtccacactctcctgctctttgctttcagacactctggtcgccttcccccagggcccctacagagctccataaagatttgctaagtgaatgaatgagttctcattttacagaagagggggttaaattccctgggttttccccttacccagcctttccccagctagttcctcctcctttacatcccagccaaaagaccaatcccgggaggctctccggacgccccctcactttgccactcccatttcctgctcccttcctatcctcccgcccccgtgcccaggtcctgctctctttacaccctgacatcttcctgcttgcttttttcctgtctcctggcaaatgtcaccatccccatttcacagaggaggaaaccgaggctcagagaagcctcagagggaatagcccagccagataaaaacccctgggtcgtgagcacgttcttccacccatagtagccaggtgctttattcatgtggttttactctgaaatcgggatggctgtaggtaataatagtggccatgcaaatcatatttcatgacagtttttgaaaggcgccgtttccacctcgcagttccagtgcaggcgggtgggactcagtggtgtgtgtgtgtgcggcgagtgcctgcctgtaggtggccccggccaagccagccccgccccaggaggaggctgaacattagtcctgcatgagggtgtctgggaactgggtgcgccacgggggccctacctcactcctccctctcacattgccgatcgagtcagccccacggcggcagcaccacgaccgaccgggatcctcgaggtgccagcccatggccgagcctgccctcctccccgccgcccagatggagaggctggccccagggcccctagcctcaccgtgtcctcggatcccgcgggcccgcattgccaggcgctgcgcccagcgctgggccgacctgggctgcaggtacaggggtcacgggagcgggagggaagttggccctactatgcaccaggggcatgtgcggtctgtcttcacaacatccctgtgaggcaagaatcttcctccatcgtacagatgaggaaacagaggcttggagagcccggtcacctggctgtcaagtggtggagatggcttttagccctagtccatgggactccaaacccagagccttcctgggacacagcattgccctgggttcaggctactggcctcctgcaggggtcactgattttcagattcttagagaccgtgagtgacgccagtatgtgccatttcctcttcctctgggtgtagagtcttagggggcccaggggctcaagattcaggagtctctgggtcaagtttctgggtcagtgtggccgtgtggtcacctcggctgagaactggtcaccccttattcctgctcagcctgccactgacagccagaccagaattttcaaatagtcatttcccccactctgattacatcatattacaatttgattattatagaaagtcaaacagtgcaggaatactgtacaggaatacatatgttcattcttgaaaacttactactgttaaagttttgacatataccttgggagaactttttgacatatgtaaacctaaacttgtatagttttacacaaataggctcttgtgttacatgtgcttgtaaggttttcccctgcaacccctcaattaatgttatggacatatttacatgtcagtaacataaagatccaattcattcactttagtggcctgccaggatccaactttatggatatctttggttaatttgaatcagttcctggctaatggacatttaggttggttccaatttttaacgattctaagcaatacagcaatgaacatctctggggacttgcatgggtaaaattcacatcctagacttgtagttgcaagtttaaaaggaatgttagaatctgaatagaccctgccctccaaaagtgttctagcttggaacacacctgcagcaggagacccccattgccccattcatttgccacccaaggacctgaagactagacgtggtctgtactcagaaagcagattcagggagcaggtgatcctgatcgtaggacaactgagtcctagaattcccttaagggaacaacttctaggctcaggaaagggagggggagcttagtgagaccatttcattcatacagcatgttcgctgagctcctatgtgcgtggggctctgccccatcacaggcaaaaattactcaggataggattttaataagaatcaattttaagaagccaaagacaagtttgtttatctgtctatctatctatctatctatctatctatctatctatctatctatctatctatctattctatatctaatctatccatctatctatctattctgtatctaatctatctatccatctatctattcatctatctatgtttcctattgctgctataacaaatcacataagcttatctatcatctctctctctgtctctctctctcatttatattagttttctattgctgctataacaaatcacataaacttagtagcttaaaacgacacaaatgtgttatctgacagttctgaatgctggaaatccccaaatcgaggagtctgtaggggtgcattctgtctgggggctctagcaatctgtttccttgccttttccagcttctgcagctgcccacattccttggctgatggtcctcttccgtcttcaaaggcagctctgtaacatcttcacacatctctctgactctgacctccacagtcatccccatgtctccttctctgactctcctgcctccctctttcattgataaggatccttgtgatgacattgggcccactggctaatccaggatcgtccccccaactcaagatccttagcttaatcacatatgcagagtccctttgcctgataacatatattcacaaatactgaggattaggatgtggacatcttggggagctgttattcagctgatcacaccatctatccaaccatgcgtcgtccgtccatccatctatctacctatctacctacctattatggctgttcccctgactccaccaccaccctcccttaatctcctggttccttgtgatctttgaggcaattaatattgaattcactataagagctcgtgacccattgaatgtgcttaatagctactggttgaatgaacagatgaaaaatacttaagagagtttaaaatttgaaccattctgtttattactgaaaacaaaacaacaaaagcaacatttttacttccagaacagtggtgttttttttttttttttgagatggagtctcactccgttgcccaggctggagtacaatggcacgatctcggctcactgcaacctccgcctcccgggttcaagtgattctcctgccttagcctcttgagtagctaggattacaggcgtgcgccaccacgcctggctaatttttgtattttcagtagagatggggtttcatcatgttggtcaggctggtctcgaactcctgagctcatgatccacccgccttagcctcccaaagtgctgggattacaagcgtgagccaatgcgcctggcccagaacagtggtttttaaaccagggttctgcaaacattttatttgaatttaatttttattatatctttcaagtattaaacatctagtaaaaatactacctccactcaggtatcccaaatgttttttgtcaactaaaattatcttgattgtatgatcagtaaatgctttaaattaaacttataaaatcagcttataataatatcaccgttacctcttttgtttattgagaagacattccactgccaaagaaaaaaaaaaaagcgaaaactacttccctggaacaaggttggtctgtttgctccaggctaatgttcttgtgtattggctcacaaggtcactaggtcagctcccccaatcctttgagtctgttcatctcactggtcccttgcttgtgagtcatttagttattcaacaaattccagcaggacggcaaccttcaggatgtaagcccggatctgttctgtttacccacagctctccagcactggcacagggctggcttgttgtaggtgttcatgaaatatttccctgatgaatgaaatgctcactgcctctacatgaagtcctgtgatggatatgagggtgtgggcatgaataagatgctctctcagcccttaagatgtccacaggctggtccaggaggaagacataacactggtcactaccacataatacactaaatgctgacctgaaaggcctgagcagggatgaatagagtcaatgttgtcatcaaacagaacatcccataatgtgagggggacaccgaattcactgtctatgtggacttcatcttaaaaccatgcaatattggccttgggaggtgcctcaaagacccagttggagtgaggtgactctgttgggattccccttatccttgctccctgtagaaatatattttctgttaattcatgattggtataaaaatgcaaaaaaagtagcaagtgaaatccacctgcccctcccacctccaacccacaagaacagcaattgtgagaagttaagtgtacatcctataggattttgtgcttcataaatatttacatacatgtatacgtaaaatgtatctatgatccaatccatgcacataattgtacttacatacgtgaattggtttgtattatgtatactattttataaatgacatttccatctttataatatcttttcctggaaagacatagaaatcaacattattctttttttttcttttggagacagagtcttgctctattgaccaggctgaggctggagtgcagtggtggaatcactgcagcctcaacctcccaggctcaagtgatcctgggaccacaggcatgcaccaccacgcctagctatttttttcatttttgtagagacagggtctccctatgttgctcaggcttgtctcaaactcctggactcaagcaatcctcctgcctcagcctcccaagtaggtgggactacaggcatgtgccaccacacctgcccttacgttatcctctttaaagactgtgtgatgtttcattttatgactggacagtacttttgttaactagcctcctgttgatggaattttaggttgcttctttttctcttttggttgctattataaactatactgcaatgttcttggacatatatctttgtgtacttatgatacattttcagaataggaatcatggagtccaaaggtgtatacatttaaaattctgaaacatattctgggtggttttccaggaaggttgtacccaattagactcaccaagtgggtgtgagcttgtttcctaatatacatgacattcttgaccagacattattgttcatttttagtcttggctaattggattgggagaaacctgtctcttgttttaatttgccctttttattattattagtgaggctgagcatcttttcacatgctcagtgtctggcagagttcaaaggcagatcagagaggcagaaagacccattttgagtctagtgcaccagccagatttccttaatcaataatgggttaaatgacttggctgattgcacacagatagcttgtagaatcaatcacctttacaaggttcaccttcactcatattttgctcatgtgtagctcaagtctctgccactggggtcaatgtcaactgatctctccagacacacccccttgtatgtgaacgcaaccactgaataaatcacctacacatggtttaaatatgtcaggggtagaaggacagcctgaatctgaaagcccagcttcaccacttatcagctgtggacctctggggaagttacttaacctttctgagccttggttccttttctgtaaaatggttgtgaacagcggtacctgcttcatagacttgttgtgaggataaaatgacattaatgcatgtgagggcttagtacagtgcccaccatttagaaatgggacaatttgtgtcagatatcagtggtcaaagggcaagttcttggagctgactccaaatagcacaggcttgttttcatgggacaagtacattcgggactcctgactccttggcatagcagaaaaatttgcatttgagtcctaaatcctccactcatcattgggaaagttccttcatttctctgggcctgatccttcatttgtggaatcagtgccattcagatagtggctgccgttcacactcacacatcctcctggttcgaaacccggaacggccacctcagatccgcagctcaggggaccaggctgccgctgggggcttctgaccagctttgcaggaaaaagtccttgcaaaccactttcctccagggctctccagcaggaggggcctcctcagatcctgcttacaaaccagcgaagggcaggtcccttcggatggagcttcctattttccctcttttctcacaatgaagcagaggtgaaggtgttaattacaccaagcagttaggctgccgcccttcacaaccctggggtcctcaccctgcctgcaatgtggaggccgcttctccacctcccctcctgtcaggcgtcaccgactcttcccaaattgaccagcagatgctcatccaagtgtgagaaggtcttttctcgatacttgccagtactgagtgttggcaatcttttctgtgtttgccaatctgatagagttcatccttgttttatttcgcattgccctgattacttgcgaggctccacatcttttcacatagggcatttgcattttatctcctgtgacttgtggatttctatctgctgccaactttcccagtagattttttgggtattttttttcttgttgctttccaggaactctttatatatatagactgaatagtaacactttatcatttgttgcagatatttcctctcagttgaggaaaaaggtcctatgacattttttatagtgtcttttgtcatacaaaagttttaagtcttgatgtaatcaactcagctttcttctgttatggcttctggattttaatttgtttggagagttgttctgcactaccatttatttcttactgactttgttctcattaaaccctaatacagacttctatccacccagggaaaactttgcacttcccagcataaagacctgctccccttcctgggagatttgcatatctcatttcctcccagacattcactgacttgtttctttaaaactgagtttcaacaccacctcctccaggaagcctcttctcagcccactcccccttttgttctctagttactactctgtcccctcgggctgtttgccccatcttaagaggactgttggctgctggctgctcgttggtcggaaggcagccttgtgttttcatgtttttggagtacttactatgggctgaatgttttacaggccttactttatttcatcctcactgccttctgtatactatcacacaatcaccctgattttataggccgcacatcaagaggacagacctaggcccagacagtgtgacttcagggccttggtccttagccactatagtggctaaggtgacttagggccacaaatttagtggccctaatttgggccgttggggcggtgaaaaagggccacaaatttagtggctgaaacaatacaaaggtattatcttagagttctggaggtcagaagtccaaaatgggtcttactggtctaaaaatcaaggtgtcggtaggactgtgatcctttctggaggctctcggggacaatcaattttctagcttcaagaagccacctgccttccttaagttgcggtccacctgcatctgcaaaggcaagagtggccggctgagtccttctcatgctaccatctctctggttttcactcttctgcctccctcttccccatttaaggaccttagtggtttcattgggcccactcaggcaacccagaataatctccccaaaatcagctgattagcaactgtaattccatctgcaaccttcatcccacctttgccatgtaacacacacatttacagattccagggagtagtgggtagtgggggggttattctgcctacccgcagtcacccttccatattgcttttccaaacttcagtcccctgcctccaccctcaggagtcatcctgcctccctccaacctggggcttagatcagtgccttggagtcacctggaaggcttgtgcaaacacagattgctgcaccccacccccagagtttctaattctgtagttctgaggcgagggctgaaaatgtgcactcctaacaggctcccaactgatgctgatactgaaggtctggggcccacactttgagaaccactgggttaagtttattaatccttcaaatatttatcaatatctgctctgttttgggagctgggcttatacaataataaaaagaatgtctctggtctcaaagagatcccagactaaaggagaaaacaaacaggcaatgaccatggagggcggtaagtgccaggacatcaatgagcccaacgcctctaggagggctgcagagaaggcttcctggaggaggtgatgcctgagctgagtcccaaagtaggcactgagcaggccaaggatgggaaggagaagggtgttcctggcagtagctgccaactgggcaaaactccagggcaagagggagcctggtgcctctgagaggtacacgtagctcacactggctggagcagagagtggggcagaggagagatgggattgcagtttgctttcaagccctgagcccggctgcaaccccagggccaggagacctgaaggtaggatgacaatctggctcttaagcccttgagtgcgtaatggaagagtgagcaatgaggacctccctgtgaagatgtgcagcaaagacagggataatgaggccatgcctcacccctaggccagcctaagaggaggtgtaaccatggcaaccagcctgatgctcttcctgctggtcttttttgaaggctttaaagaccagatgttcttaatctggggctcaaggatggaccttcaaagatccgagaaccactaaaattatttggtaaatgttatgcatctctgtgtgtgtgtgtggttctccggagagaggatccacaacttacataagattttaaaaagctccccccactgtgccacccccctaccccaaaccagctaggaagatgttatagaccaggagttgtaaactctggtgcctacaagggttaagtgggaccctcagggagtcacgtggcagagtgtaacatctcagggcatggtgaggattgtggaaccaaggtgtgaatgggaaaaccaagctctgtaatatattttaaggtttattctgagccaatgtaagagaccctggcctggggaacacagtctcaagaggtctgagaaggtgtctccatggcagtcagattacagtttggttttatgcattttaggggagacaggagttataggcaaagacataactcaaagcatagaagctgtataatggtttggctggaaaaggcggcatatcttgaagccggggcttacagattatacgtggattcagattctttaatttgcaattggttagaggagtgaagcttcgtctaaaaatttggagtcagcagaaaggaatgtttaagagaaggaagtctgttaaccaatataccagttcagagttgctcgtaggggtgtgtgagttcacctttgtctggcacagccataggtcctgtttataattggttatcttattgtcacaaaaagtctgttttgtcaatcttgtgatgtcttttctttttttttttcttttttttttttttgacagagtcttgctctgtcacccaggctggagtgcagtggcaaaatctcagctcactgcaacctccacctccggggtttaagcgattctcctgcctcagccttccgagtagctgggattacaggcacccaccaccacacctggataatttttgtatttttagtagagatggggtttcaccatgttggccaggctagtctcgaactcctggtctcaagtgattcacctgcctcagcctcccaaagtggaggcaaggcgtgagccaccatgcctggccattgtgatgtctattttaacattaatgctggtcagatgctgtgcctaaactacaaaagggaggagcgtataatgaggtgtgtccaacttcccaacccatcatggctacgaattcagttttgcaggtttccctgcgattctcttggccaagagagtggatctgttcaattggctggggggcttaggattttatttttggtttatggagggcactaagcctatttaaaactttttttttttttttttttttagaaacagggtctcactcttttacccaagctggagtgcagtaacacaatcatagctcactgcaacctcaaactcctgggctcaagcaatcctcctgcccacgcctcctgaacggctgggactccagttatgcacaaccacacttggctaatttttttttttcagacggagtcttgctctgtcgcccaggctggagtgcagtggcaccatcttggctctctgcaagctcccgggttcacgccattctcctgcctcagcctcccaagtagctgggactacaggcgcccgccaccatgcccagctaatttttttgtgtgtttttagtagagatagggtttcactgtgttagccaggatgatctcgatctcctgaccccgtgatcctcccacctcggcctcccaaagtgctgggattacaggcacgagccaccgtgcctggccacacccggctaatttttgtaattttttttttgtagggatagggtcttgctgtgttgcccaggctgatttccaactcctgggctcagatgatcctcctgcctcagcctcccaaaacgctgggactacaggcatgagccactgtgcctggtctaaaacttctaatatgatcaaattaacaacattaatacttaatgttattttaataaaaacaacattttatgtaacccaatatgtccagaatattttcacatgtaatcaatatgaaacattaatgagatattttacattttcaaatatgaagtcttcaaaatccagtgtgtatttttcatttccagcaatctctgataggatgctaaattttcatcagaaatccttaatatatatttagatttcataaaatatacagccagaaaagtagatttgtgtacccaagttgttctaaacatatttaggccttttccagtaactgaaacaagtatgtagttttaaatttaaattggttaaaattaaataaagttggctgggcacggtggctcacacctgtaatcccagcactttgggaggctgaggagggcagatcacttgaggttgggagcttgagaccagcctggccaacgtggagaaaccctgtctgtactaaaaatacaaaaattagctgggcatggtggaaggtgcctgtaattccagccgggaggctgaggcagaagaatcgcttaaacccaagaggcagaggtttctgtgagctgagattgcaccactgcactccaacctgggcgaaagagtgggattctgtctgaaaatgaaagaaaagaaaagaaaagagataagaaaagaaaaggaaaggaaagaaaagaaaagaaagaaggaaggaaggaaggagttaaaaattcagctcctcattcatactaaataccatatttcaagggctcaggtggctagtggctacaatattggccagtacaaatcaagatgacaatctaagtgactcaggaagggacacacaaatgtctataatcttgttcgaaggaaggatcagggaaagcctacacaacttaaggactttcgaagcttctctggcaagcaccacagggctgcgctgctggctggaggcctgttttaagaggcagccaccacttggcttcagccaattgtcacttagagacacagacccaggattatcatctctactgattattttttcccaagggaaattggaaattagaggacttaaaaatgtgagacctcctcattttcaaatgatggcaagctatttaaaaggtgtgaaaatccattgtgtgtgttggggacgtggtggggggatgcagtttgctatctcagatggagattggtagatcctgatcttctgttgggaatatttgtcgtctcagaggtcatgggcagtaccttaatctcccccatccatctaaaaaatgcaggctgcccctcccagagtgctatgtgagaattctgatgcaatccatcagttcccacccaactcttgaaacctatgcaattctctgaaccccagcaacataatgatactcctggctttccaaccctggttgcacaatggaatcaacaataggtgcccaggtcccattcccagcagtttgggtgtcattggtctggctggggcattgcttgggcataatggcctggcaaagcttactgggagattccagcccatgggcagggtggagaagcaccctgccctggagaaggtctctgggccaggtctccacacctaggatgcagcttcttgggcccagcgtgggtcctctgttctgatttgtgcccaacttgaacagctaaagggggcacccatagctgtgccttccctgtctctcagcccaggctcctgtgtgattcaggaagctaaattatattaattacatttcagaatgttttattcttgttgtctataacacaaaatagccatgcttgtgactttcataacccacagatcggctctagcagaaatgctgtgtgaaagagatatggcgagcatcgtttaataattcaaagaatggtcacactgtccagaatgagccagtcttctttgtcttaatgggaaagttgtagccatagagggattttaggagctcagttaagatgatactcaaaaatgtaaaggtaagatttaccttttataacatctcattcccacccatcccaaccctgttgccacaggggttgcttcgtagatgtgagtgttgctgtgtcccgatgttcaggttgtgcactgcatgtgagtgttacactcagaggggcaccatttacgtagtcatcatgtactaagttatgtgagtgatatgggtaggcatgaagaatccagacctcctggcaagtcctgaggcaacagaggagagaccctcttcataggcacacatggctatgtacacattcatgagtgactgtgcacccacgattccctggcgtacccatacacacatggctgtgccctgagattgcctttctttctttctttctttttttttgagttgggtccatttttattgtggatcggggcttagagcataagcactggtcagcatcattagctgcaccatctaccatccttctctgtgacccatctctataggagcgtctaaatttagcccaagaaatcaggatcaagaagggggaaaaaaaaccattggccacatggccactcctgctatatctacacctaccagtcactgaacacttacccaaggtgacggtttccatgcaggagacccaagcggctctgctagggacaataacttatttgcctaaagcttttttctttctcaaaagagggggcagagaaggctgatttctagaagtagatgtggaattgaagaatgtcccagggagctaagttttaaggactagccacaaacttgttgcttctccaacaatgtcatgaatccattccttgcaccatcgcacgtttttcatgcattcaaaagtgtctctagagctccagaaccatgagtacctcatcacgtcctgagcgtcacatcccccagcaagctgcctgcaccaggcctttctctagaagtcctgagactgagtactctccgaaggctggaggtttgtgcgagtttgtacgtgtggttgagcgcttgtgtgaggaaagtcccgctggggttgatctccatcaaggtcaagttatccggcttggcatgtgcctcctgttgcctcacaaagctgtcagcagacactcggagtttggctatacgagtgtcccatatatccttgaccagggtccggatttcgtctgccttcgggatgttgtctgaagcatgatttaatgggagcttggtaagttccatgtagtaaaggctggtgggcattgaggtaaaaaagtttcttcctttcattcatgatccctcatcttctccaacttttctatgttcatccactccggagggagcagtcgacatttctgcttttgtttcaggttaattgccagccacgggggtacttccactggtaaaccagggttaaaaggccccaggtacccaccccaatgaggtagctcttgtccagactgaagttggggataatggtaaccagctccttctcagccaggaactcgacctcggccacgtccatggcggcgcgagtggccagctcgggcctcacagtctccttgggcccttcagtgtcccggaggaggtgccgcagccactgttttccccgagattgcctttcaatctctgctctaagaggtccaatttctatcctttattgattcctgactcagaaccggatgtgtctctttatctgggggttggagatagggtggaacatggagcgtgcacacagccagtggcgtgtgcacctggcacctgggaatggtgtgagtggcagagagtgggctcaccgcacctctggcagagctgctggggttgtgcgatagcgtgctgtccctgtcagctatcactgtgtgacaaatgatccccaaacccagcagcaatcatttccctaagcgacgattgtgtactcccgctcctgtgtctgaaggtggctggggattagttgctctaccctaggctctgctgggcagctccatttctagccatgggtctggctgaacttactcctccctgcttactgggctgtggtctgtgccataggtgttcattctgggacccaggcggcagctgtccagggacggctcttctcatggtgttgatagcggtgtgagagggccaccccaccacccaggcacattgcatacctgggcttgcccagagccaaaggcacatggcatcccacacagccactccctgatggtggctagctctctcacccacctctctccctcctttcccttcaccccaagcttctcaccttcccccagattccctgctcagcaaagtaaagcttggcactgcccaacagcggctgttgctcttccagccttccccactggggacaatctcaattcattgctccacaacatatcattacccaacaacaattatgggacaagagatacgttcaaaagagtccaggaactctgtggctcaggtgatagggataagagctcagctgatcagaggcagagctggggctacatctgggctggtggtattccctcaccaaccacaggctgcatccagccagtgaaagaaaagaaaacattcacaattgaggaaagaccgttgtacaagcggcttattacacagtggttgagaacatggactacagagccagacttcctggggccaaatgcagttctgccatttactagtcaggtaaccttgcagaagtcactttatcgctgtgcctctgtttgaccatctgtgaaatgggatgataagaagttgtgaagagtaaatgaattaatccatgctaagcagtgtttctcagccagaatgatggtgttccccagggaacatttggcaaggtctggagaccttgtcattgttaaaactgagagggatgctttggcgtctagtgggtagagggcagggatgctgctaacttactacagtgcacaggacagccctccttcacagcaaagaatcatcctcctgacatgctgttagtactgagcttgaggaactttatttatttatttatttatttattttgagacggagtctcacgctgttgcccaggctggagtgcagtggcacagtctcggctcactgcaacctccacttcctagattcggtggaactgaaggctgcccccaaagccctattcaccacttttgggggaagcccttggctgggttgctgaagccaggccacgctccctgccccagcaggtccaggctgagctgacctggtttggctgctggagaggaggctcagccacacctccaccgactcatcccgatggcccgcattcttgctccctcggtcatgctggctttcggcttccctgaacaggctctcggcttcgctgagcaggctcttgcttctgtggctctcagctttacatgggtttctgcagccctgcccttgggaaaggcctttgctccactgtcatattattctcactgcctgctatgacctcacgggcaagggtctcgctaagatcaccttgcaaagcccccttctctacccctgtcttcccattttatggacttggaagctgaggtccatcgagaaaaagggacgtgcccacagctgcacagaacatgagcaggggagcttggatgggagccgaggacttctaggacctgcctcatctttcaggccacctagggggaaagttcatgtgtgtggagagaagggctttgcattcaggaaggctctaagcctctgtgagggctccggccctctgactcactgcaggaatatatttcttcatgctctgtgcttgtaagcccctgcccactctgcaggacaggaactagaggccactcactggctgggcagtcttgggtgagccacttgctgtgtctgaatctcagataggaagagtccagaagcaacatatattgatcaaactaacattgactgaggacttcctattctaagcaccttaggtgtattagcttcctagtaactggccatagtaagggctcgataaacatttgctgaatgagtgaattggctcttacactacactgccccaggtagtctctgttagcttcatattaaaatgaggaagctaaggtccagccaggtttggggactccccaaggtgacgttgctaataaacaacaaatctaggattcaaattcagacccagttgacactagagccaaatttcttgactttttttttttttttctgagacggagtctcacattgtcacctgggctggagtgcagtggtgcgatcttggttcactgtaatctctgcctcccaggttcaagtgattctcctgcctcagcctcctgagtagctgggattccaggcgcccgccaccacgcccattaattttttgtattttttacaaaatacaaaagagacggggttcaccatgttggccaggctgttcttgaactcctgaccttgtgattcacccacctcagcctcccaaagtgctgggattacaggtgtgagccaccgcacccagcccaaagttcttgacttctaaatttacaaatctgtttatctattgcttagtggcacataacaaccatcattttattccgcttagcgattcgatgggtaaggaattgggacagagcgggcaagaatacctgctctctgctccatgatgtctggggtatcacctgggaagactgaatggctgcgggtgacttcatgctggggactggagccatctgtctggaagtttctccactcatgtgtctgacacctacactcaaatgattcaagggtgaggttcggctagggctgttgactggggcacctgcatgtcacctggcacttggcctgagcttctcaacatagcaaccccttccaaggagcaagcagagagtgagagagccaggtgggatcagcttggtcactatgaccagacagagaagtctcatcgctcgacctctgctgtgtcctcttagctgaagctgtcacagcctgacagattcaaggggaggagacataggccccacctccccatgggaggactgtaaaagaattttgggaccatacgtgatatccaccacaactactgtattctaggcagtgttctaggcactggggagacagcagggaatagagaagccaagaaagaaatagttccagcagaaatgaatgtgttatggagaagcagatggcagagacgtaatccaggttagggatgagaaaggttgtatttgaggaagtgactttaagtctgagacaggacattccaggcagagggaagaaggaggtacgtgagacgaggctagaagcatgggcaggtcagtccaatgccttcgtaaggcatttggattttatcctcagggtcctgggataccatgaggattcctagatgcggtgaaaggccagtattgtgagcttggaagatctttctgaaccagagaagggtatctagacgaaacatgggaagactgcgatgaggctgtggtccaggcgagaagtgatggtggcttggaccagagtggtggttcagaagttggtggatagaaatgttgtatgaaaggtaacattcattaggggttcatgggatgtggagacaccaaaaagggtgtgaggagtggctctcagagtgcttgatggaaccatctgatgagacagggaactctgagaggggcacagtgtctacagtggggaaggaaaaatgcattcagattacttcatttacacctggggcctccctaaatcatctagtatggcagttaagtgccctggtagtggggctttcaacctgggttcgtatccgggctttgtcacttgccaatgggacaagtcttggtgggtcccccaatcccgttgggtctgtttccttgtctgtaagttggaaacaatagcacccctacatggcactgatgtattaaactgaggtttggccaggcttgatggcttacatgtggaatctcagcactttgggaggatcactggagtcaaggcatttaagggcagcctgagcagcatagcaagacctcgtctctactgaaatgaaaaattaactgggcatggtggcatgtgcctataattctagctacttggggggctgaggtgggagcatcgcttgagcccaagacttcgaggcagcagtgagctatgatcgcgccattgccttcgagacagagcaagaccctttccaaataaaaagaaataaactgatgcttgaacatgtttgcccctgggcatgtagtaggtattcagtaaaggtttgaaaaccaaattacaactggaggccacgctgtatacttagcacctgagtacttttctgcatgcgctatacctcaacaaagcgctggaaacaaaacaaacaaaacatcagctatatttgtgaggttctgaacaccttttgtggatgcgttctcttcctatcgttctcttcctagaagggggtactcaccgccatgctgcaaaatgtgatgttggaacaatgacacctttagcactgcgggtgtttcattttgtttctgttctttcccctctctgacctcctcagaatgttcttccaaagaaataattgctgccccctcactgcttagctatcaaatggtgatagtgttgacaattttgcttgggtttagtcgctgcagttttcaaattgtcacgaaaacacacagatgctggtaatttcaaagcgaatcgcaaagcaaccaaagaaacggagctgtgcccccagcatggggtgccaaacagattcgcaggaggcactgactggcagttttcttgaaaagcataaatagagcagaacagccaattttataattaactgggacttggtctccagtgaagcttctgctctgtgcaaatgccggagccgttgccaggaggttgtgccctgtcccttccttcaggctctggccgactggaggtttctttgctttaccacattttgagtctgtttcaggatggaattgtttaggactcggagttgagctctgtgtgggcaggacgcttgagaggaagccacaagccagggtctacggtaaaatcctggcaggaaaggccatgtgcagaaagaacatgggtccctcattcaaacattgttaagaattttgagatggtgacagcagttctctgaacgaagtgtgggctgcttccaaacctgggccctgtgtgactgcacaggtcgcacatccatggagccggccctaggtcctggattacacctccagaaactggggggacaacagtgagtgaggtcataggctgagggcaaaatacaacttcagggactccaggggatgggatcccacaagatgggggctaagcaggcagcaggggtaaaatcagaacaaacaaacatccaataaaatagtccttttttagaggcaatgtgataagagttcacaaaccctttgattcagcaattctacttctaggattctcttctactgtacaaaggaacaaaggtaacagatggtattatttgtgatattgatgaatagaaacaacccaaatctccatcaaaaggaaatggggatatttcaaataaatgcgctgtgtgggggaccttcctgtgagcatccagctcctcagcaaagagctatcaaatgcttagcatgcatgggactcttgtggggctggtggaggacttgagttctgtgtcttggctgacatgagcccaaaacaatgtcccctgagtgaagaagagagtgcctgcctttaggttaaatatgcctggggagaaacatgagatgtctgcacaccaaagtgttagcatggaaaacgtggtcgtagccacaggagaatgattgatattctactttgctcacttctgcattgctgggaatttttacaataactgcatattgattttataagggaaaatatagctaacaaaaatgttttaaggccgggctcaatggctcattcctgtaatcccagtactttaggaggccaaggcaggcggattgcttgagcccaggagttcgagaacagcctgggtaacatggcaaaaaccctgtctctacaaaaaatgcaaaaattagccaggcatggtcatgtgtgcctgtagtcccagctactcaggagtctgaggtgggaggatggcttgagcctgggaggcggaggttgccgtgagtcatatcgcaccactgcactccagcctgggccatagaaccagaccttgcctcaaaaaacaaaaacaaacaaacaaacaaacaaaaacagaaaagcacatatatatatattttttttttaaaaaggcagcatgtggatgacttttcctttttaatccaaatgagtcttgttttttaatagggcagttcaaaccacctatgtttattggttttctttgccttttgttggtttccacatgggagcttaaatatctatagaacttgcagaatatacatttttcccacttgaggaaactggggaaatggatttcttccctctcttctggcaggggtagtttatggtctatttgctggcatgtgtcagggtctaggtgattccagtctagtatttttgccattatgaccaaccctaccatttctcaaggatttgggccagcaacagggacattttgtccctaagctcatctgaagtcctggacttcatttatatggaccaggagacttgcactgtcttaccctgagattctttgattgcatgaagcagaaattcattgagtgtagcttgggaagaagagggggattaaagggaaggatgtgggagtcagggctctaggggtaaaccacatagcctggatcatgaaaggctgcaactgggacctggaaaatcaagcttaggttaccccacatccctccatgcctgcagagggtctcctctctgcttcttttggaagactggccactccagccccacacagcttccagttcacgtgcctgatactgacccctctgcccttggttcaacaccttgagagaatgagattggctcagtgatgtatagcacctctgtgatcaggtacctgctctgttcaaagctggctgggagaggggaggagatgaggtgctcctgtgatacaaacaggagacccagggcttggcagccagactcacaaaggaggaagtgtgagggaaggagacaggagactttctgggtaaaaattcagtgagatccacgagacactgccctgtcatttcctcgcctgtcctggtgtttaatcccctcttgggaatgctgcctttaccgtaggtatgtccaagactgttagccttgaccaagaaggtggaagcaagcagagcagtctggccctgctctgtcccctgcagcattgctggtttccaaggatcccgcaggggtgatgggtcaccagtcaatttgctgagatcaccctgagaaacatgcctaggaagcttgcttagcccccaggggcccaggctgatttctggagagccacaagcctcagcacaacccccatcataagcagagacttgctgacctccctgcaccttccccacttgctacagctctggcccctcctcaggccgaatggatcagcttccccagaagaatctcctgcgactacaccctgctggctctgctggctgttccactggagtggagagctccagcatggatggcttttggatggaggtggaacagatccaacagagagatgagctgagggaagaggacagtggcgggaatgaaggccagcttccagagggtgagagaccctggcgggggcctataggggtggtgggagggcttgattccaggcagagaaatgtcagaggatccagatatgaaccagaacatgacagcattttctctgttgcctggactggtgcagtatcctcttcactgctctccctgcttcacccgtgatccttactgtctgttctccatgccatagtcaagacgatcttttagtaatgtaaattagattatgtccctccttagagtaagtccttcaggaaatattttttgagtgcctattatgtgccaggcactgtttaggcactggggatacaacagtgaacacaaaacagtctcctatatacagacctaatgttctagggaaattctaagccctctgctctaaatcctcaaatatctctccatctatctcagagtaatagacaattatgtgtccctattatctactactatgtaacaaaccacctcaagcttagaagcataatgcagcaataatcaattattatgactattactatacctcactgttggaggggttgagtgggctcagctaggtggttcttgctcagggcctctcatgcagttacaatcaaatggtagctggggctggactcatctcaaaagatttctcatctatgtgcctggtggtggatgtgaccatcagggggcctcatctgggattatcatctggaatacctgcatgaggcctccacatgtggcctgggcttcctcacagcatggcggctgggttccaagcacaagaccaagagagagagctgggtagaagctgtcttgctgcttatgacccagctttagaagaaagacaacattgcttctgctgcattctgttaccctgcatgcagctatgttcaaggggaggggaattagactccaccccttgatggggtgagagtcaaagaatttggggacgtgtaataaagccaccagatcataacttaccaggctttacataattggcttcgtgcctcctctctgcctcttctcctcccaccctgactggctgtcactctacttctgtcctcgggcctccttgctggtccttgaccctaaaagcactttcctgcctcaagtcctttggttctctctgctcccttggcctcaaatgctcttgccccaggcatctgcatggcttgttctctccagtcaggactgggctcaaatgttacctcctcagagaggtcttcaccagcttccctacacaaaatagcacccctgccccatcactctctagcccctgccctactctgttcgttgctgcagcaatgatcactgcctgactttacctagtgcacttcactgtgcatgtgtctgtgacccccactagaatgtaacttccatgaggccagggacatcatcggcccttttcactgctgtgtccacagtgcctagaacagagccaagcacattcccctcctccatccttacttgttcagcagatgagggaatgaaagggctccacatggaacccttcctggtttggcatgtaattcagctgggcttgcccctggttggcaaaacagaccacgtggtgatgcagacctcctaagggcctaatagtctcatgcagtgcctccaagtgtaaatgtaaaaacatccctggttacactagaagtggtttcaggagatgccctgcataggaggtcctccatgtggcctctctggaatcatgatgtggccagcaatctaatttcccacaatacacagggagtggagtcagagtgggtcagagagaagccactttgagcaaccaaataaacacaggagcttttttagactcacagggctgagggatcctgagtggcatggagccaagactggtttttttttttcctttcttttctttttatttatttatttaatttttgaaacggagtttcactctgtcacccagactggggtgcagtggcacaatctcagcccactgcaacctccatctcctgggttcaagcgattctcctgcctcagcctcccaagtagttgggactactggcattcaccaccacacccgtctaattttcgtatttttagtagagatggggtttcgccatgttggccgggctggtcttgaaatcctgatctcaggtgatctgcccaccttggcctcccaaagtgctgggattacaggcatgagccaccatgcctggtcatcttttctttttattcggacaccaacttgaaccagagggattgttaataatttatttttcccatcaatgtctactcatggcaggtgatgttggatgctccatttatggtggggatcttgtttccttttaaaatagatgtgttttagtaaaaaatgtagcccatgattaaggggatatatttggtaaggaattttacagggacaattagatacagataaaaattataaaggtggttggtgaatgcctacatttcaagaaacagtggctcattgaaaggatcctgtacaaacaaaaaaatgtctggcatcatgatagaatcagtacctccaccagccagcacaagtcaggaatggacccacaacattgcaactgccctggaggcatctgttctggttcccaagtgcagggaaagtgttgggggaagacttggattatttgcaaaacccaggctgccataaaagcagttttgtttgagtttttaaaacacttattaccttgttgactaactgggtcaacactgggtacaactgtacaccccaccaatcctctcacacatgtgttcaatttccagtaagagctcttgtccatttcccccatgataaggccagtgtttctcaagtgtggtctgaagaccctattgcattagaataatctgaggaagacattcgaagtgcagattctcaggcccgaggcctgaactcctggaacagaatccctggaggtaagacccgagatcctgaaatctcaacacaccctcccattccagttaatggttttgctatgggactatgagagtttccttaggaagcacagtagaggggacaattccaacacaaataaggtcttgaatatggaggacttcccaaagggacatcaacacccagcaccaacttcccaaggggacaccatgtgaccctgtagtggtctctgccagattttggataagtgggttcattactttggagagaagtgggtccaaaatctgaacatgcagggcccttcacccacctctgttttccagggattgctatgttatgggttgacatccatacactggctaatgctatcagtaccccccaccccgcccccagttctcagaaggctcattagatcttctcccccggagagtctggttggtgttaataggtctcacgatcagatatgcagaaactcctgtgtccaggtgagtgtgtgcttctatgcagaactttggttagcacgagtggctgagtgcagagctgtgtgtgttcatctgggttctacttctgttggcagaaggggaagctgaatcccagtggctgcaggacacaggcctgtcgggcctccttggtggcctgggcttggatggtgatcaccaggagctcctgtccaccctgacacagacccaggtggccgctgtgtgccgccggctggacatctatgctcgctcagtgcgaagacaacacaagacacctgtcagagatgtcagggatgtctttggggtcttcaattcaggggtaagtggcatatgggtcattgcaggccccgtctgactgggatctctgtgctgccgccacagcctgagagatgcagtgatcctgctgaagggctgtgttggtgtgtgtatgtgtgtgttggtgtgtgggtgttggtatgtgtgttggtgtctgtgtgttggtgtgtgtgttggggtgtgtgtgtgttggggtatgtgtgttgggggtgtgtgtgttgtctgtgttgggggtgtgtgtgttggtgtgtgtgttttggggtgtgtgtatgttggtgtgtgcatgttggtgtctgtgtgttggtatgtgtgttggggtatgtgtgtgtgtgttggtgtgtgttggggtatgtgtgttgagtgtgtgtgttgtgtgtgttggggtgtgcgttggtgtgtgtgtgttggtgtgtgtgtgttggggtgtgtgtggggtgtgttggtgtgtgtgggggtgtgttggtgtgtgtgttgtgtgtgtgttggtgtgtgtgtattcagagtgcagtggcttgcacacgtatgtctccctgccttccactatgtccctatgttgcatgtaggtcttcatctcccatgcatgccactgcatatatgcctgttgccactgtgtgtccttgggtgagcctgaaagcctaggttctttctatataattgttattgatgcagggcaggcaagcccctaaattggggattagctctggaagcttttggtttcactcaggaaagaattcaagagtgagctggtggtagaagaaaacaacactatggaggcagcagtaatacagtggcgtgactgctgctgcagagcggggccacccgataggccgtgtccaggacagcagcccaggggcaggaccaccctataggctgtgtgtccagagcaacagctcaggagcagttctgccttttaattacatgcaaattaaggggtgagttattcagaaatgtctagaaaaggggcagtaatttccaggtgttgccatggcaatggtaaactgtcatggcactgtgggcatgtcttatggagaggtgtttttgcctcttccttgtttcagccaaagtcccacctcctacctcattatcagtacaaaatcctttttttttttttgagactgagcctcgctctgtcgcccaggctagagtgcagtggcgacatctcgactcactgcaagctccgcctcccgggttcacgccgttctcctgcctcagcctgccgagtagctgggactacaggcgcccgccaccatgcccggctaattttttgtatttttagtagagacggggtttcactgtgttagccaggatggtctctatctcctgacctggtgatccaccagcctcggcctcccaaagtgctgggattacaggcgtgagccaccacgcccggctggcacaaaatacttttttattgtcactgtgtatcctgctgacacttgaagcctgataggttgtgggcatcatctttcttggagcacctctgaagtggcatagcagtgattaaaaccacaggctttggagccagccagacttgggccccagtgcccattccccgacttagcagctgtgggactttgggcaagtaactcagcctctctgggcttcagtggctccatctgtgaaaaggggttgtgggtggcttctgtctcccagggttgtgtgagcattgtcagcttcccacatgagtaattgggcactgtctgtaatttgcatagaaaatgtcgtcagagaatggcgactccggtatgaagggggcccagctcagttccggggcctctaagtttcctccaggtaagtggtcttcattctccagggccctgagaatcctccaggctgcataaagggctgctctgtgaagtaagagaatgtgcacacctcccagcatttcctgcttcctgctgactccctgccttccctgctcaagggcagtagggaggagccctgaggggacaggttgggcccttaagtgagctgttgccatcaggcccatggggctcaagatgggaaaattctcttcctgggcaattggccttagctgggaaatcacttcctggggcagtgagggtcttagctaggaaatcatttcctgggggcaatgggccatagctaggaaatcacttcctgggcaatgagcctgagccctaaacctaatgatttgatcctggggctttgaacttgagcttgggagctcacttcttaggactaagggcctaagtcccgaacccaagcacttgcttcctggcagccagttctcactgcctttctctgctttgtttcccccgccccgcagcagcagagcctggggggctgcaggagcaggctgggagggaagaagccttcaacatggactctgcctactcagaacaagctgcggtgctcctgcagaggagcaggccatcccggggaggcacctctgcctggggcaagtgttccctgccggtgaggatgctgtccacagggctggttggctaggtccccctgtgctcaggcaccagcacccatctcttcacaccttccacactgacaggcatccagcacaaaagttgttaattcattcattcatttaattcgtaccacaaatatttactgagtgaccgctgggtatcaagactggggagcaggatgcttacagtctaacagtcctgtcagtattgtctccatgctctttgtttttatccttagaaagccctccctcctccagcaagctcataactgtccatcaacatgtttttctagttacttttaaaattaattttagtgcctggagtgacagagagagacccaatattttagttctgttctttcctccctctctccctccctcccttccctcctcctcctccttcttttttctttctttctttctttctttttctttctttctttctttgtttttcttttctttctctttctttcctttctttctcctccctccttccctccctccctcccttccttccttccttctttccttccttccttttcttcttcctttctttccttctttccttcttttttttttctttgagacaaggtctcactctgtcacccaggcgggagtgcagtggtaccatcccagctcactgcagcctcaacctcccaggctcaagctatccttacacctcagtctctcaagtagctaggactacagttgcatgccaccatgcccagctaatttttaaaattttttttagagttaggttcttcctacattgcccaggctggtctcaaactcctgggctcaagcaatcctccagcctcagcctcccaaagtgctgggattacaggtgtgagccactgcacctggccgttcttttttcccaaaatattcagttatcccagcatagttccttccaaataggatgtaatcattgatagttaggtttttaaagattgaactataactcgctgttaagtgcacagatatttaccaggtacagcttggtgtgtatgcccgtgtaaataccaacaaatgagtacagaaacttcctcccttgcttgatggcttgtaatatggaaaaagaaagaaagaaagaaacttcctaccccaccaccccctcagtgcccgcatgcccttcccaggtaattcctttccctgcagaataaccactattctgacttctctcatggagtaaatatagtctttcacagtccctctattactaaaggaagtgtttcttctttgaccacgtgatgatgcagtcgatgcaatcttaggtaacattttactgagggctgccctggcccagggcattgttcccaaggcttccagtgccctcattgctccctgactatatgatagaaagaaagagaagtaggatcgggcacagtggctcacgcctgtaatcccagcaatttgggaggccaaggcgagaggattgcttgagtctaggagtttgaaaccagcctgggcaacataacaataccccatctctacaaaaaatttttgaaatagccaggtgtgatggtgcaggcctgtagtcttagccacttgggaggctgaggcaggaggatcacttgtacctggaggttgaagctgcagtgagctatgattgcaccactgctctccagcctgggccacagagcaagacctaaaaaaaaaaaaaaaaaaaaagagaagtggcatatgttagtctgtttttacactgctgataaaggcatgaaagaggtttaatggacttacagttccacatggctggggaggcctcacaatcatggtggaaggtgaaaggcacgtctcatgtggcagcagacaagagaagagagcttgtgcagggaatctcccctttttaaaaccatcagatctcgtgagacttattcactatcacaagaacagcctgggaaagacctgcccccgtgattcaattacctcccacagggcccctcccacaacacatggaaattcaagatgagatttggcgggggacatagccaaaccatatcatggtgctcagagaggagaagtgacagaattggctcccacaaaggccaggacaggaacacctggcagcctgaccctggagccttcccaactgaccaccactctctactgcttaggaaaccaaccccaccccctgcagtagcctctattccaatgtgagagtactttcactcattcaaatggaattttcttaggtccacagcaagttgcaaaaacagaactcccacgtactctgcacctagtttctcttagtgataatattttccattaatcatagtacatcaaataacatttatatttatttatttatttatttaattttttcttttttgaaacagtctcactctgttgcccaggctggagtgcagtggcaaaacctcggctcactacaacctccacccccgacgttcaagtgattgttgtgcctctgcctcccaagtagctgggactacaggcatgtgctaccacacccagctaatttttgtatttttagtagagacagggtttctccatgttggccaggctggtctcgaactcctgacctcaggtgatctgcccgcctcagcctcccaaagtgttaggattacaggtatgagccactgcacccggcctaaatttttttttttttgagacggagtctcgctctattgcccaggctggagtgcagtggtgcaatcttggttcactgcaagctccgccccctgggttcatgccattctcctgcctcagcccccgagtagctgggactacaggcgcccgccaccatgcctggctaattttttgtatatttagtagagatggggtttcaccgtgttagccaggatggtctcaatctcctgacttcgtgatccgccagcctcggcctcccaaagtgctgggattacaggcgtgagccaccgcgcctggcctaaaattttttaataatgagtttctatttctaaaacatcagagataattaatattcaacattatcttgtctttttctttgacagtgtttctccattaaattatgaatgatgataataattaatcacgctaaagggccaggcatggtggcgcacacctgtaatgccagcactttggaaggccaaggtgggaggatcacttgaggccagaaattcgagaccagcctgggcaacatagcaagaccccatctctacaaaaattttttttaaataattgggtgtgggccaggcatggtggctcatgcctgtaatcccagcactttgggaggccgaggcaggcagatcacttgaggtcaggagtttgcgaccagctgggccaacatggtgaaaccccatccctactaaaaatacaaaagttagctgggtgtggtggtacacaactataatcccagctacttgggaggctgaggcaggagaattgcttgaacctgggagacagagattgtagtgagcagagatcacgccactgcactccagcctgtgtggcagagtgagactccgtctcaaaaaaaaaaaaaatagttggatgtggtggtgtgtgcccgtaatcttagctactcaggaggctggggcaggaggatcacttgagccgagttcaaggttacagtgagctgtgattgtgcccctgcactgcaacctgggtgacagagcaagactctcctctgaataataataataatgctaaagacatcacatattgatcttttaccacacactaagcattatgccaagtacttcacatatttgatttaatttcattctattaagttagtgataactgtgttaataaactaaaaagtagtagtaagtattgagtactcactatgtgtcgggcaccatgtttcatacactttattgaatttaatcccaccaacagtcttgtgaagtagatactgttatcacttccactttgcagatgaacacacaggtaaaattatttgcgtgcactcacaggtaaagtcaggatttgaaccccgggggatgtgactccatagcccatgccgcaagcactaggctgtattataagcatcaattactatttctttccctttgagcactcgaaaggggcactgggaagtggtccagccacgccctccaggcagtgctgagcaagcctggccctcccgcttgccttctctgaccttgggcggcaggaaagcctggagctgcctgcagattcccaaggtggcctctagatggcacggttgagcattctttatttctgccggtggcatggccaaggctggggacagagccggtgaggcagaggaacaaaggaccagagtagaagcaataataagaagcccatggggtgatccctcttctccaggtcctcttgtggaagggcaggcagtgaaaacagtttctgtttcttggggcttcgctatgtgcttgggactgtaccaagcactctatatccattaggtcatttgctcccgctaaaattttatgaggtcgttgccgtggctcatgcttgtaattccagcactttgggaggctgaggtgggagaattgcttgagcccaggtgtctgagaccagcctgggcaacatagagaaaccctgtctctacaaaacatacaaagattagccaggtgtcgaggtgcacacctgtagtcccagctactcaggaggctgaggcaggaggatcagttgagcccaggaggtcggggctgcagtcagcagtgttcatgccactgtacgccagcttgggcaacagagcaagaccgtgtttccaaagaaaaaaacaaacaaacgtgcaaaaaccttctgaggtaggctctattttatgattatggatggagaatcagagcctcagaatgtcactccgtttgcaagaggtggagcttggacttgacttgaggatggactcctcttgagtgcttgctcttatccacgctgctcttccttctgcctaaatgccctggggagaagggggagccccaaaatacacatcagactcatagcctgacaaattgtctttacttccctctctattaatagaagtttaccgtccccaaaggcagacttggcgtgacgaggataggagacttgtccctgcaggatatgaggaaggtaccttctctggccctcatagagctgaccgcgctctgtgacatcctcggcttggacctgaagaggagcaaggcggggaagtggaaagcggcaggtgagcagccccagcccagggaaagccctgtggccacagtcctcatagggagctgaacacggactctcccagcaagagatgctcagctttgtctttctttcttttttttttttttgagacggagtctcgctctgtcaccaggctggagtgcagtgatgtgatctcggctcactgcaacctccgcctcccgggttcaagcaattcttttgcctcagccacccgagtagctgagactacaggtgcgcaccaccatgcccagctaatttttgtatttttagtacagacggggtttcaccatgttggccaggatggtcttggtctcttgacctcgtgatctgcctgcctcagcctcccaaagtgctgggattacaggtgtgagccaccacgcctggccagcatgctcagcttctatattccttctgtttacatttttttttctgcatatgtaaacaattcctgctcattgtgggaaatttgtgaaatagagtaaaatacaaaaaggaaaaaatataattcagaaaagcacttttagtgtattatcttcctttgtgtgtatatgtgtgtatccttttttcacctaatattatataattatggtttgggagcagtggctcacacctgtaatgccaacaatttgggaggccgaggtgggaggctcacttgagcctgggagtttgagaccagcatgggtgacatagtgagaccctgtctctacaaaaaataaaaaagtagccaggcgtgctggtgcacacctctagtcccacctacctgggaggctgaagtgggaggatcacttgagcccgggaggtgaaggctgcagtgagccttgatcatgccactgcactccagcctgggtgacagagacagactctgtctcattctatatatatagaactatgagaccctgtttcataattccattatatataatagaatatattatagttatagatctatattatagaacattatatataatagaattatggacattttccagttattgtatcatttagtggttgtcatgataatgctacataacaaacaacccccaaactcatgacttaagaattctttactcttgctcacatgtttatgagtaaactgggcgtagcttggctgatctaggcttagctccaagttgttggctgagtgtaggtctgctcacaggtctctcatcctcctgggaccagctggctgtctggaggatgttcttatggtgacagcagaagctcagagggcaaactgtaccgcattttaagcctctgcttgcatcttgtaggttaccatgccattggtccaaactagtcacatggcctagcaaggggtgaggaagtacgctgtgcttccctaatgggaagatttgcaaattcacatggcagagggtgtggatacaaagaggggtaatgaatttagaacaatagtgacatttaccacaactattaaatattccttgaaaacatgatttttatttatttatttttttttttttttgagagaaagtctctctctcttgcccaggctggagtgcagtggcatgatcacagctcactgcagcctcaatctccccaggctcaggtgaccctctcacctcagccgcctgagtagcttggactgcaggtatgtgccatcatgccctgctaatttttgtattttttgtagagatgcagtatttttatgttgcccagaccggtctcgaactcctgggctcaaatgatcttcccacctcagcctcccaaagtgctggggttacaggcatgagtcaccttgcctggtgaaaacatgatttttaatcactgcactattttcctcctcgtggatgtattctaatatatttaaccatttccctattagtggacatttttgatgcccatgtctttcctattataagacacaatcattactgctgtatatatgcttttgaatgcatcttagcttactttagattatacttatgagttaagttcctgagataatattgcccttcagcagtgtatgaaagtgttcatttcactgcagcattgtcaacattatgcattgtgattttttggtttgttttggtttggttttttggtttgtttctttaaagacaagaggatggtgaataaaaaaagaccagggggaggaatctagcagaggtggggtaggccagagaagggagaaagaaggaaggtgtggagaaaatgtggaaggaggagtttgcctgagaagacctcaagccagggtggttaagattgacccagggaatacattctctaggacctggcccatcctgcagagccagagctctatccaggactgctgttacatttttatacctggtgccttctggagcagcagcgtgcttccctttcaatacttttttttttttttctgtgagacagaactttgctcttgtcacccaggctggagtgccatggtgcaatcttggctcactgcaacctctgcctcctggattcaagcgattctcctgcctcagcctcccgagtagctggggttacagacacccgctaccacactcagctaattttttgtgtgtttttagtagagacagggtttcgccatgttggccaggctagtctcgacctcctgacctcaggtgatccgcctgtctcagcctcccaaagtgctgggattacaggcttgagccactgcacccggccctttcaatacttctttaaccagctaagattttctgctctgagacatatctcctcagcagtaatgttttaatgaaaacattactgctgaggcctaatgttctgctcaagaggagcggtttgggtccaaccattctctagagagctcagtccttccacaggaaaaggggtctgattctagttgcccaggagatcctgtaggtcggagcccagtgatcattccaagaagtgaaatgtgcctctgctctttgactttctgcagaaactcgcctctttggtgtgccccttgacagcctgctagaagctgaccacaaagtcctccccagcacacaggtcccgctggtccttcaagccgtaagtcgcccctaccccagcttgggtttatttaatccttcagaggctggctcaggggaccattgtcaggagacatccagcaaaggggtgaaaggatgtgctttagaatcaggcagacttgggttcaaattctggctctggcacttgctggctcagagacctggggtggatttttgctgttgttgttgttgttgatgttgttgtttttattttataaatttttgtcttggctgggcgccgtggctcacacctgtaatcccagcactttgggaggccgaagcgggtggatcatgaggtcaggatatcaagaccatcctggttaacacggtgaaaccccatctctactaaaaatacaaaaaaaaaaaattagccgggtgtagtggcgggcacctgtagtcccagctacttgggaggctgaggcaggagaacggtgtgaacccaggaggcggagcttgcagtgagccgagatcgcgccactgcaccccagcatgggcaacagagagagactctctcaaaaaatacataagtaaataaataaataagtaaatttttgtcttaattttttttgtagagacagggtctcactatgttgcccaagctggtctcgaactcctggcctcaagtgatccttggggtggattttcttttcttttctttttaacttctgaatcttaaagtcaagggtagatttttgaactttcattagcctccctttcaacatctgtaaattgggatgatgataacagtatcctcctcttatcaatgattaaatgagaaaaatgtgtatgaagctctcagaatgctgggctcatggaagtggtcacaaaaactaatattattccgaaggaaacccttctcctggtactcccctctttctgattttcatgggagacaaacacaccattttgaatcctgcttttcagcggttcctggtttaaatgctggtttctctttctgacagctgctgtcctgtttggaaaagagaggactggacatggaaggcattctcagggtgcccggatcccaggccagggtcaaggtaatggtttggcttcctggcttcactgaggctgcatctcccccatgctcacatgtgtgttaagccgggagggaaaccagtccctgactcgccagtgatctgtctttggtctctgtgtgggtcgagggtttgagaggctgaaggtggcatgatgagcatggtggcagagagtgtgggccctggagtcaggccaccaacgtttaatgagcagagctctgtgctcagtgacacgcacgttagaccatttcgtccttacttcaaccccacgagggaggtgctcttgttgtccccactttgcagatgaggaaaccaagccccagagaagtggtagagcgacttctaccagagccctgggccaactgtgttttcatgccccgccttcctgtaggggctggaacagaaactggagagagacttctatgctggcctttttagctgggacgaggttcatcacaatgacgcctctgatttgctcaaaaggttcatccggaagctgccgacacctttgctcacggctgagtacctcccggccttcgccgtggtgcctagtgagtgtgcccaagcccttagcctgtgcagggatggagagttggctcactggccttggtggagaggggaagccatgcaaaggcaggactccgtgttcctggaaatgtctgttccagaaatgtccaactgatgggggaagaagcaagtgtgaacatgtgagcccaatgtgtgcacatacacatgtgcacgcgtgtcctgcgtgtgttgtatggcatgtgtgcaggtgtgtgaggagaggaggctaaggttttgcacactacagtccctattagttctcacatggatgagtggactagtttccttcacatcttgacatccatggggttgagcttatcagcatcattacctgtgtatctgtgggcacacatgtgtgtgcatgtccatctgtgtgcacatctgcagatcagcatgtgttgcacggaccttgctgtatgtatagtctgcatatatatgttcctgtctggacttcttcacaatccacaatgaacaaagatagtcacttctatttttctcaaaaaaatacagcagctctcctgagatctcactcacaaccgtgaggttctccctgtctctctgaattctccaaaaagctccaaggctcaggcagtctgatttctacccccaagctagggacagggatcctgagaggtcctctctgacctttgattctcacgaccgcagcgttttggttgttgttgttgttcttcttcttcttcctcctcttcttcctcttcttcctcttctttcttcttctttcttcttcctcttctttcttctttcttcttctttcttcttttcttcttttcttctttcttctttcttctttctttctttttttttttttttagagatggggtcttgctctgtcacccaggctggagtgcagtggcatgatcctagctcactgcagccttgaactcttgggttcaagtgattctcctgcctcagcctcccaagtagctaagaatataggcacatgagaccacgcctggcatacttgtttaacatttttttgtagtgacgggggtctcgctatgtcgcccaggctagtgtcaaactcctggcctcaagcgatcctcccactttggcctcccaaagtgatgaggttacaggcatgaaccatcaggcttggcctcaacctcattgcaaaacataaatcagattccttccctatgctgttgcccaccctccacagcactcttgtaataagattccacttcttactaggcccacctcctccggctcaggtcctgcctatttctggccccctttcctcctgggcccctccttccccactgtctggccaggctctctcgctttgctgttccccctcctctttccttccctggggcctctgcacttgctgctgtgtctgaatggaacctccctccaccctcatttggctgctttctgccattcaagttccagctggctgtcattgcctgcgaggggccttccgtgaccccacacatcatgctgcctgccagcctctataatgatgcaatgatgcccatcatactctgatttattctttgcttgtgtattatgtctcctctctgaaatgtaagctccatgagcctgtgactttgttttcctcctttactattgtgtccaagattcctagactgagcacagcacctgacaggtacttgatagatatttgttgataagtgagagaaggaaagaagggaaggagggagggagggagggaggaaggaaggaaggtaggtaggtaggtcatatggggtcgcaggcctggcgcccagggtgctcagcctctgtctcctacgcagctcttctccaggttccagccagctctcagctgctgggtcttgtctggctctgatgaactccttctttgaatctataactactacctcctcctacctacctcctctccccggagatcctgacaccaggtgtgagacagcttttccttttcaaccctcacaacacagagggtttcatgaaaaccttctatctgggcccattgagctctctgtctcccttcctaagggtgatttgctggttcattgcatttctgaccctgggctgcagcctggactgcatctaggtctgtgcggcatgtgcttgcctgcacatgcatgcgtgtgtttattttgttacacaaagtatagcgagtgaacctcccacgagcactggtcagggctctgtctgagccaacattagacaaggaaatagtcccacaccttatgaaaaaagggattcctggctgtcccctggctttccagctctggaatttccccaagaagagaccagactgagggagggagtccctgagcctcccatggagactgaggtccctcccttcccgcagacatccccaacctgaagcagcgcctgcaggttcttcacctgctcatcctcatcctcccagaacccaacagaaatgccttaaaggtaagagttaccatgcaccaccaccactctgccatctcagcccacagccacagccatggcttcaaatgtgctcattcattcattcattcattcaacaactctgccaggtgctagggttcagtgatgacccacacaaacctctcttgagactttttcttaaagaaagtagatgagtcctgaaaggggatagtcccggagtgggcactgcagagcgtcagttccacgtggtgctaacaggtgttagcaccttgtggccaagcatggatgggtaaacacagagttcatgaaacaaggttaagaatacttttctccccaggacttctcaaagcctttggtatattgaggctttagagaatctccaagtgggattagagtatgcagcactctccaaactcagttgatcacagacctcttttgttgtggaaagcattgcatggcactggtgttccatgcagaaccagtttgggaaacagacccttagcaaattctccttgtcgtatgggaatggatgcagggccttggcccagctccctgtaccgtcttgactgtccttcagtcagactcaagatgtgcctccaggatcagcctgaggaggccccgggtcttcctgtttgagtttctgcttccttttcagtaaactgaggatgataatagcattaatagcatcttgtctaattgttttggaaatcataaaagctaactcatgaggaatcatggggtagaagatgatgctttgcagggtactcaatatgtgtcctcttttcctatcctctctccctccctctctcccttcctttcttcctccctccctccctccttccctcccacctcccttccatttattcttccttccaccacccatttattctcattcgtccatctattaatcttttctttctccattcatccatccatccatccttccatccatccatccctccctcccttcttcactccgtccctttgtccttactggctatatgactcttggcacattctccaagcttgtttccttatctgtaaaacacatgcaataataagagctaccttggccaggcacagtggctcattcctgtaatccctgcactttgggaggccaagacgggaggatcacttgaagtcaggagttcgagatcagcctggccaatatggtgaaaccccgtctgtactacaaataaaaaaattagctgggtgtgatggtgcacacttgtaatcccagctacttgggaggctgaggtgggagggtcacttgaacctgggaggcagaggttgcagtgagctgagccaagatcacaccactgcattccagcctgggagacagagtgagactctgactcaaaaaaaaaaaaacaaaaaacaaacaaaaaaaacctaccttataaagtttctgtgaggattaaatgagatgtaccaattaaaggcccaggaacacaaagaatacatagtaagtggtagctctcatcactttctgctgctcttctcagtgtctctgcttctcccagcatctctgcttctctattccttcctttgcattttgggtagacccagactccagaaagaaggagctatcctgggcctcaccaggaaatgacccatgttccagacctgtggcccttttctacctggaagttgaagtctgacccagttgtctcattagtctctgagggagcaggggagggaaagagtcttggacacactgcagagcaggaaacggagacacagagaggtcatggagtgggccggtgacacagctggaacgggagcccctcttgctgccctcccagctcctggctccttcctagcacccccttatcattcatcagaatgccctggggatggtggggaggcgccagggatgggctgagatttgagggaggctctgcacccttccctaggcactgctggaattcctcaggaaggtggtggcccgggaacagcacaacaagatgactctgaggaatgtttccaccgtgatggcccctaacctctttctgcaccaagggcggccccccaagctccccaaaggcaaggagaagcagctggcagaaggggcagccgaggtggtgcagataatggtgcactaccaggatctgctgtggacggtgagtgctgctgggcgctgggtatccctctgggtgcagctgccgtgccgcccctgctctccaggagcctgggcattgtcctttcagttccctagtgtgtcccttccaggacctttgttggcctctgcacaggcctgtgttttcttcctccccctgccttagtaaccaagaagaagtgtcttcactttctgtctccactgccatgcctctcagtcagtctgctgccatctggtctaccccagattgcaggagttcccccaactcctgcaaataattccttcacatcaaagcttttatgctgctgagaaagccccatccctgaggcccaggatcacagggcctgcctaagacagagcccagaaccagataacagggatacccctgccctcctgcccccaccgtgagctttgccctgagtaacaagtgacagcaaggggaggagccagagcaggagagaggcccctctgcggtgtcagcatgcatggtgcccctagcactgagacccctccagctcttgagactcctgtgaacacaaggcagcaccatctaccactgctgaccaggctgctttctcacctagcgatgcgtagcctcttccctccatctgttcattcatccttccattcagtctcccatccatccacccactcacccacctacccatccatccatccacccacccatccatttatgcaactgcccgtcacccacccactcacccacccacctatcccccccacccatctacttacccacccatcaatccattaattcctccaactcccccatccacccatatgccaatctatcatccactcacccatccaccaatcatgcatctctccactcatctaccaatccatccatccacccactcattcacccatccactcaaccatgcatctatccaactaaaccacacatctatccaactatctacccatccatccatccactcatctaccaaaccatgcatctatcccactatctacccatccatccacccacagtccttccctctatcccttccttcttccatggtcattaggttagatttcctattccagaaaccagcaagtgaagccctctctgactgttcccacttttcttcctaccctgcctgggcactcgtctgtgttctaaacacagcaaacgccagctggcactccaaactcatctagtacttcacacttctgaatttttgcttatgcagtttactctgcctggaattcccttcccttttttttttttctaagggcagaagcctggtgtcctctgctcattcttcaagacctcctagttcaaaagtcaactcctctgtcgaaagtcccctactcctccctcatacaccccttatacccccatagttcctttcttctctgcactcagccctttgagataatgttgctactgaaagacattggattgtaatacttctttttattggaggatgctttaaaaattcaagaaattcttgaatgttttcttgttagaaaagcttcagaaaacatagatgtagaaaaagtgaaaggggagaacccccatcaccctcgctcttccccgtgtgtgtcacctttagacagcacacacatagcagcaaaaaggggaattcagaatcgactccagtttcgtcagaccctgggagacagaaacatgttattagcagggtccatggagtctgggttctctgactctgctgggttcggatcccacagagaggcatgggttgatctggaggtctctgtaggaatcccccagtgtgggctctctgggggttctcagagcagagcctgctccaggtgtgttttggggacacccctgcctgagtgtgccagtgagcagctatccctcagcaggtgcaggaccctccagcttctgtcgaggggaccactatccactaagcctcagggtgggctccactctcagggtcccctactccaaggtccactttaggggctgaatgccccctcctcattccaccaaaccagtgcttccgtcccgtgtccaacaaatgcatatttccaagccctgtgggacgctgggccagggaagaggccacgatgaccctggagagggctctgcctctcgcccccagaagtcctatccccctgccaaaacttgatcctttctggccaggtcgcctctttcctggtcgcccaggtgcgaaaactgaacgacagtagcagcaggcgcccccagctctgcgacgcaggcctcaagacttggctgcggaggatgcacgcagacagggacaaggcgggggacggcctcgaggcggtgagtgcccccgaccccagacaggtggagaagggccgaggcgacaggagggcacctggggcgcggtgcttcccttcctccaggtccccgctaccgggctgccagcaacggcccagtgaggccaccagggggcgttgcggcgccgtcacggggagcgaggaggcgtggctgcgaaacgagggcttagaagcgggttggggaggggaaatggagtgactcggagacttcccctagaaaccgtcaccgccgccccatttttcggcagcccctggccgagggttgggaaaatgggagtcgctctgcggggtgtgaggtgattggggctgggtgggggatagtagaagggaagagccttccaaaaatactgagtattcctaggaggggtcctgaacacggttccttattaaagtcccgattagagaaattgatgagcgttgaggctgcaccgtgcacgatgtgtgggtgatgggtctttatacaaacctacatgtctgtgtttgtgggtgcgttgcatgtactcctgctgtgtgtacaagtgcaccgacacaggcatagaaacacaaacataggcatagaaacacaaacacacatctggaatgtgtatgtctgtgatctgtgcccaagtgtccggtatgcgtgtgtgtgtatcttgtgattttcagcgtgggcatttgcgtaagtgccatgtatgcgtgtttatgcatccacgttggaactccaggcaagctgactcttatgtatatggatctttctctctctctctctgcagactcccaaggtggcaaagatccaggtggtctggcctatcaaggaccccttgaaggtgcctctcacccccagcaccaaagtggcccacgtcctgaggcagttcacagagcacctcagccctggttccaagggtcaagaagacagtgaggacatggacagcctccttctacagtaagaggcacctcctggaggcaggagcctcttccctgcagggagggctctgcaccccagagctgaaggccaccagggggttacacatactgttggcctgacctggccttccctttctggggtggtcagatgggttctccaatcttagagagtttcttggctccaagtaataatcatgatgaccaccactcactcattcactttaataggtatttaatgaatgcctaccaccaggcaccatgtttttctgttggtttgtttgtttgtttgtttgtttgttttgagatggagtctagctctgtcacccaggctggagtgcagtggctcgatcttggctcactgcaacctccttctcccaggttcaagcgattttcctgcctcagtctcccaagtagctgggattacatgcacctgccaccatgcctggataatttttttgtattttgagtagagacagggttttactatgttagccaggctggtgtcaaactcctgacctcaagtgatctgcccacctcagcctctcaaagcgctgggattacaggcgtgagccaccgcacctggcccaccatgtattaagagaattatagactagccatgaaaagaacagacagaggccctgctcttaagagctcacagtcctgaggaagacctggatataaagcagatagtcacgaatcaaagatcaagttacaaactgtattaggtttcataagaaatgcagggaacaatgtgtctggaagccaaggaagctggtgtcatctgggagcgaggtgaggcttccaggcacagaaaactgcacagtaaaggtcctgcagcaaggagcagagcctggccaaggatctggaagaaggtcgggggctgatgtgcagccatcattcctagggtacaggaaacagcctgagacctcaagagcttccttgttggcattggcacaagggaccctcagactgtcatcttcagcaagtatctgatccagctcctccttgaacagatgggagcactaagactcagaaaagagaagggacttgccttaggccacatggcagaaaagaggccatggaattgaactcaggatacccataattatcatataataattgtgattcttacatgataggcatcattatcatatgtaatcatacaatgtccataatccatcttgactcaaaatcttcccctcacagcaggctcctgtccccatctgtcaccactcattcccttgccttcgcagtctccattctgatgcccagaagaaaggggcctcgcagcggggtgcacccctggctgagcctcaccacgtgccctccagctacctctccccagcccctgggtgctggactctgtcactggctccagctctctcaggagggtccttatgctgcttctccccagcaggaccaaaaatcagtgaggactgccctttccagggctgggggccatgcacagttgttggtcttgatgtttccagaagaaaaaggcagtagttttttttttctctctctctgttttacagccataggtccatggagtcagccaacatcctcctctatgaagttggagggaatatcagtaagttccactgtgggaaacaggaacagagcccgggtccctgggagttcttcgacctcaaaggctcactgggcccttctgtgggaggccagagtaggcctgcagatgagccctcccttcaggtctctgtcttcaatgaaaccaggtggagtcctgctgtaaggttaaaggttagcctgtgcaagtcttaggagcctatcctggagtttggattttgcctagagctggcctcaggcttgcagagagatgcagaagatttgtttagtgtgaaggttcacagtagcaccagtgaaaccgacgcctctgggacaccctagctgggatggacttcatccctggcctaggggccaaggagtccttaaggaattctgcaaacacatatccagctctgggagttccctggctctgtgggaaccaaggatgggccgctgtttccctttgcattctctagagtaatgatcctcagactttaccagaacctcaggatcccctggagggctaagacacagattgcggggcctaagaatgtgtgtttctgatgagttcccaggagttgcagatgctgctggtcggggggccacactttgagggccactggccaagaagcagaagctaagacatgtcttcagtagtacacgatgcattgagggggtgcccctcaggaaaagggttccaagggacagagtgaaggaggatagggaaggggcaggggccaggagtgttcgcatcctggagcttggcctgatccactaggtggctctagagaacaaatcacatcagagttgttgcattctgaggcaagggcactggtcttcagtacatctgtgtccgtcagtcatcgaccgtgggcttcccaggggaaagggggtgtcacttttctggcaaggcatcttccctcagcggagctcagttctccagcaaaagaagtagctgtgagctgtagcagtcaagatgcatacagccaggggacagtgcactgcctggtgaagggctctgtgcaggggaacagcatctcctacagcctcccactcaacctccttcaccccttcttcccacagatgagcatcgcctggacccagatgcctacctcttagatctgtaccgtgccaacccgcatggtgagtgggtccttaaacagaaccccacctaaaccctgcgagtctcaggagcagcctggatgcctcctcctctcccctgctggctctgtgtccatgtacccagcatgagaacaaagctattccaggggagggtctgagttttattccaaggcttccttttctgaaatgcctctcagacccctcagaaatagactcaggggtggtgctctctccactcagaggggatgaggggctagggcctcagggaggggaggccaacactgtagccatgatcagccctggaagaactggacagaggaagaacttcccttcacagctctcatgttttaaccgtgcacacaatgccctcactcccctccaccctccagccctccagagagttgcttcctacaccaagcttgctgtatgacgccaccacttggggcgcttggatctccatgggcttctgtctgtggcttccagactggaggaaaattaaaaatgcagtacctttatcaagaggtagttggggtcttttccccccaggcaaaattgtttcgaaagtggccctacaatgtgtagtagcagcagcaccagagacaaaaccaggagagctctgtgaccttggacaagccccttgccctctcagaatcctttcaggatgaggggctagggcctcagggagaggaagccaagattgtagccatgaccagccccgggagaaatggacagaggaagactttgcttcacagctctcatgctttacatgttgatttgtacaatcttgtcattttgtaatatgatataatatgtaaacgtaattgtttaaacagtaaaggcacaacaagttcaatgtcacatttactttgcctgtttttctctccagtccagtgctcggtaggtgttgtccttccagcgagttgacgtgggagcttggtgacgagagcatcttgctgagctgctcaaagggctctggcccatgtgatccagccacgccttgaacccacaaccaccgggggcgggagggcaggaagagaactcagaatggggaggcatggagtaatgatacccattgctgaagggtgggggcattgcagggacagcctctctgggaatcctctcatctcctacagtcccaggtctcacccttcctcttctcctctgccctgggtctgtatcctcaggccaggtgaggcttcgcttatttgttcacttaacaatgagtttactgagcatttaattatgtgccaagaggttcacaaatttaatcttcacaataatccagtgttttcggtttgggttcccccagaagcaaaatgtgaggcaaagactcaaatgcaaatagtggtcctaagaaatgcaagagagtggggatatgagagaaagagggggaggcagtctataaaagggtgcccaatcacaagcaagctaccactgggggcatctcgagcttaattccactggagaactctgagaaacagtatggaagatgtccttcagagttaccctacccaagggtcaagggagccagtgtgtttattcaactcctgtgagtcattggttgacagctgctcctgaggagtataggtatttgtttcctggtacttccgcctgccagagtgcaggcacagtgtgctccaatactcagagaaagccctcaagaagagatacagatactggcaagtagacattggccactgtacacagatggcaagtgctgaagggatatgggtgggcatcaacagaacctgcttcatcctgtgaggcaatgatggtgagatactgatgctgatggtgatggtgatgctgctgatggtggtgatggtgatgctgctgctgatgatgatggtggggataatgatggtgatgctgccgatggtgatggtggtgatgatgatggtgatgctgctgatggtgttgatggcgatgctgctgatggtgatgatggtggtgattacgatggtgatgctgctgctgctgctggtggtgatcctgctgatggttttgatggttatgatgatggtgatgctgctgacggtgatgatggtgatgatgatgatggtaatgatgatgatggtgagggtaataatggtaatgatggtgatggcgatgatggtgataataacgatgatgctgatggtgatgataatgatggtgatgctactgctgttgccactgatgatggtgatgatgccaagagcttgacaagtttgatcttcacaataatccagtatcttagtttgggcaatgatggtgatgatggcagctgtcactaagcagttactacgcaccaggcattttacagatattaattcctttgattctcacaacaaccctatgtgacacgttattattccctttttataggagaggaaaaaccaaggctcagaaagttaacattacttgtctgcatggctgataagtgacaggttaatctggtgtcaagatgcaagctctactattttagaccataaatatgaactgttttgccataaatacccatatttaaaagtgttttggtaatggtcacttcctcaatgtcccctcttccctccctcatcccacaatacaaataatctcagaatgagagaaggtatttctcttaaaccaaggagacctagtaaggagggattgacatttgtcctggaattcctcaatagagcatttgaagcttgtagctggttaagagcctctgagcggcctcagtttccctagcagccccatctgaagagccaagatgtgatgaagcatgaatttagcctagcattagccccacaatcctatgaggtgagtgttaccatagttccactttacagatgaagaaactgagtttcagacaagttaaaccatggattcaaagtcacacgcagggtgagaaacttggatgcctgattccaaatccagggctttttcagtcacaccatgatttcctgaagcaatatcaagtgcctgataggtgacagcaagaagagtcaagaacagcagtaggaaaattggacaaattatttaagttggggagataccaagggattcagccagagttgctacttctgttcaccaatgtcctctctacctcccatggtctacctacaagccttttggacctccctccaaaatatactccaatccatccacttcactcctttgttcctactaccatcctaatccaaactactaccatctcgatgccttggataatagtgatcatgatggtggtggtggtagtggcgttgatgatggtgatggtaatggtgatgatggtggtggtggtgatggaaatgatgatgttagttgtggtgttgatgatggtaatgataatgattgtgatggtggtgttggtggtgctggtgatgataatgatggtggtggtggtggtggtgatgatggtggtggtggtgatggaaatgatgatgatgttagttgtggtgttgatgatggtaatgataatgattgtgatgatggtggtggtggtggtgatgatggtgatgatgattatgatggtggtgttggtggtgctgctgatgataatcatggtggcagtggtggtgatgatggtggcggtggtggtggtgatgatggtggtggtggtggtgactgatgagaatgatgataatctaaaatagttaagagtttacatcttgacaccagatggtgcaaggccttgatggcctccatgcctcttaactgctctcccttcttgctttcctctctattcatatatagcagctactgtgggcctttaaaaatataaattcaatcttactgaaagccctcctgctgaaaactttccagagggatcccattaaacaaatatcccaactctttaccctggcctatgaagccctatgtctgtgacaccacttcactcatactccctcccaccttactttgcagagccagtcagtcacatgagcctccttccaactcctcagacatcccaagttcattcctgctttgggcttttgcacctgctgttctctctgtccacaacactcttcccccagctacttccatggccagctcctttcgcctttggatctcaggtcagatgtcccttcctttgagaggccatctctgactaccctatctgaagttgcttcttctgtcactctctctggaattgccttggtgaattttcttcctagcatttattactatcctaaattatcttattgagtcagttttttattttctgtctccctgactaggatgtagccccatgaaggcagagactatgtgggcttttctcacttctatggatatgatggatatgatgtggatataatggtactagcagatgctcaataaaaattggctggatgaatgaatgaatgaatgaatgaatggatggatgaatccctctctgtccctttgtttgctctggaagctgttgcccttatcaccttatttaactctcacttccctgggttcatgtatgaaaatgagaaaatgcatctgaagtacttatagcaagtgctcagccagtgctctcattattattattaattattaacaaaggccagacagcctaaaatagtgactaatggtactatcctcttgtgcttcccagcacctgcggtggtccctttgcacacctcattcactcattcccagggtctggatgacaggatgcagtgtggttggagggaaaatcctttacccttggcaggaggtgaggcaggttcctctgtgagtgctgagagcccaggccctgctgtgctaactttgcactcagagtgggctgtcagccaccagcagagggtcccagtttaatcacatgtcagtttctccattcatcttcggtgctatctgagggctcatctttttctactctgtggcatcgtcatgattgatgatcctgcaccagctccaccgccgggttagctatattagcatagctcacagtgggtgcccagctcctccgggctctttgtggtctgggccagcatagggtggcatcatgtttctcttaaggagctctgttgtgaatggaatcgtgtcctcccaaaattcatatgttgaatccctaattctcaaggtgactgtgtttggtgataaggcctttaatgaagtaatgaaggtaaaatgaggtcctaagggtagcaccctcatccaatagggctggtgtcttcacaggaagaggaagagacaccagagccccctctctctccccacgagagcagagaggacaggcggcgcgaggacgcagtgaggtggcaactgtctgcgagctaggagaagcctcaccaaaacccacattttctggtaccttgatcttgggtttcctacctccagaaccgtgagaaaatagacttctgttgtttaagccaccctgtggtgtttgttataggagtcttagtaagctaatagaagctcctagctgcctccatcttctgagaggaaggaggatggaatttgtaaagatgtcttcaaccaggagagtttccttggacaaagggtggaaatgagcctcagcaggggcggactctcacctggccctcaggtgtgtgctttcctgggagaggctgcatttattgctatggggctgcaggtaatttgcccaaaccaaaatttgcaggtaatttgcaaactgaatctctatgctcctagagattcagtttgctctttctagatcaccaaagaggatgatgaggatgaaatgaggaaacctacagtcacgcaacaattatatcaagcacctactgtgtgcctggcactgggctaggctggggccacagtgatgagcaaatcaaggaaggtcccagcccttgtggagctcacagtctagcgagcgagagatatactaacctagaaatgaaaagattttatattgtaatacaattctgctgagaaaagtaaaacagagacgagagaggacgtggggaatgtgggcgaatctttgctttgaggggccagggaagggtcttagattgagtgccctcagaatcagaccctgaacgaggaaccagagggcagggtgcttatttgggaggtgatcccagaaagacgcagtggaggaatggggaagtgaggcggggaggggagaagccagtgaaggtgtgctaaagagcaggttacggcttcgggcaactgggactccacgctgcaggggttcccgggaagccgcgtagaatacgccgctgacacgtggagtaaagaagggagagtgttaaccaccaacccccaccacttactggtggaggactactcccagggcgtttgccccccggcatttctacctggtcccccaggcaggctcagcaccctcctctgccagaggaggatctaggcagagtcctaggttctggcaatagaaagccatcagcatggacaggagccatgggtgctggggtggggcagatgtgacctgtctgaggaggcgacccttgaaccgacaccaaaatgatgagaaggggccagccacgggatgagctgggagaggagctctgcagataaaaggaagagaaagatctcggccaaagcccttgtcgacgctttcgttgtgtgcaggtcagagggattgttgggacagcctgggctaagggatgaatcaggttccccaggagctgaatcaggttccccaggagctctctctagtctctctctctctttctttctttctctctctttctttctctttctttctttctttctttctttctttctttctttctttctttctctttctttcttcttttctttctcctctctctctctctctctctctctctctctgtttccacccagacccctccctttgtacccatcttcaacggaggcagtgattggctggccagaactgtgggcggggcctttggggtccaatcctaggaggatctgggccattcattggcccctgtgggaggtgggcgaggtggagaaatgggacccccaaggagggaggtgagaagcaggacaagttgacaaattccgcaactacgaatgccctccacttccctagtgctggaggacagggctgagccctctggccattcattgatgctcccatgtcacactggtcatgcctcttggtggcccgaagtggcctgcccccaacaactgcaggtagccccaggacacagggagcaccagtctggcctagtgtcgcaaaggcctagtgccacaaagaccacagtgaggccaattggcacatgtggaccacacagaggggtgctctgcctgtagtggccaaggtagtagtggagcccaggccttggatgttccattaggaagtccctagagtgccctgcgggcatcccctggcttggcagcgtctcagtgtgggtccccagaagcaggcagtgagacaaggactccagtgaaagtcatttatgtgggaggcgaaggaaacagcagcaggggagtggagacatgagacaggcaagggaaggcgccaataagcagcgcatcatcaaaccagctaccgcatcacaccagctactgcatcacaccagctaccgcatcgcaccagctactgtgtgggtgactggagctgaatcccactggggaacccagggagaccatggagacacttctcagggttggttacccctgggaagcaaggaagcaggagtattgaaaagcccactctgggctgggcacggtggctcacacctataatcctagcactttgggagacagaggcaagaggatcgcttgagtcaaggagttcaagaccagccagggcaacaaagaagaccctgtctctacagtttaaaaacattaaaaattagctggatgtggtagtacatgcctgtggtccctgttactcaggaggctgaggtgggaggatcacttgagtccaggaggtcaaggtcgcagtggttgcagtgagccatgatcacatcactgtactccagcctgggtgacagagcgagatcctgtcaaaaaaaaaaaaaaaaaaaaaagcccccatcatggtcagttactgctcaaggctgctttgggtggtcatacccctgaacgtccagcctgtgtgtgttggagggaagactccatccgcgggacttgttggagcacactgaagtcacaagcttgagagatctggattgggtcgacagtatcacttcacttatttggaaattcaattaactagagttatgttctcagtaatttctacaaacccgtggggctaatgtagggtaccatgtcccttatctgacctttgattcctccacccttctcccagcccctagctccccaactcaagcatccctttgctccaaggcacagtgtctccaggagacaccttggaaggagattcactctcgccaaggttcctcatcactagcaggggccacccaaaagcccagccctaactcccatgaagcagagagagcccctcccagctattctgcctgcctccttgttccctctcccctcccctttttggccccagtgtcctctgaactcactctgtctgctcctgcatcacagcctctgcatacgttggccccttttcttagaatgcattcccaccactccagtttctgcctgttgaaaagtttcaacgtgcaatcaacaaaaatgtctattgagagttaggcactgggaatggaacattgactcaacaccacacagaacttccttttggagtttgcactcgggtggaaaaagaaatcagtcatcacacacatttttctatactcacaatacggtaaatgcaatgaagaaggacagggagacacaaacatatagggttggggggtggtggctggactggatctggggtttcccaggaggtttctggggcagtgatatcaagctgaggcttgaaaggtgagtgggtgagaggtggaagggagcatcccaggcagaaggaacaacatgttaggccctgagatggactctgcatagctggtgtggctggaattgagagaaggcaagcgggcagggggcagagtgggcaggggctgcaaatggatcctgagagatttaggaagacaggaaacatttacatctatcaagccgccctgcctgggaattctgagaatgccctaggcttaccctcagctcccctaaatgcagcccccaaatcctcctttaggagactgtgctgctaatctgttccagagacaggcttgggactcactgcccccggcacgccaaaggagtctcatacattcttcaaggcctaattcaagttgctcctctctgagaagctctctaagctgatttcagcttagagagcttctcccacctcccaagtcctccacctccgaagtcctccttagctcttggctctttggcatctgagagcactgggacaggggtgaatattccttagtctgccgcttggggcagggcagcccaggctcttgctccagggacggtggacgatgctgcctggtacctggctgtgggcaggtgtgggccaccacctccaaggacccatcattcctgcctgctcctcacacctggagatcacaggatatgtggaattgaagcttttagggatccataagggacttcatccacagacttgcagggaatgatggtgggctgggggagggggtcatccccttttcttggtttttccaaggctggggtggtagaaaggaaaatgattcctggcaaacccgtgctgctgtcccgtgcctgcctcccagggctgctgagagggtgggagatgccttctattgagaactccccacccccatccccaaccactttgcattctggggcaggggagtgggagccacttgtcattgttcctgtacgttggctggcaggaggcccagggagggggctccccaatagaaaatctgcagctgcctgtctttaaggtaaaattaccgtaattaccccaattactaaatccatcaagagctttggaccggaggcctggagaacaattgggccctgatggatctgaggagtatgagtcacgggggtgggggcacaaagcacatgggatgaaggcgagtgggggcggcagctgatgttaaaccaggggtggggatggggaaatgcaaagagattatgattagccaagaccccactttcctccttcagtgagatttttcttctctattggaaagaaaaaaaataccccaaattctgtctgccttttcctttcacagaaccctgcaccttgggtgggcgttgtgactcacgccagtaatcctggcactttgggaagccgagatggaaggatggcttgaggcctggagtttgagaccaccctgggcaacaaagggagaccccgcctctacaagaaatttaaaaatcagccggccatggtggtgcgtacctgtagtcccagctactccggaggctgaggtgagaggatcactagagcccaggagttcaaagctgcagtgagctatgatcacaccactgcactccagcctgggtgacagaacaggactctgtctctaaaaaaaacacaaaaacaaaagaaccctatactctatggccacctgacttagacccgctttgaccttttatgagagctaaaatgtaaagagttgagagcaatggctagcatctcctgggtcccagcatggaccaggaactatgggaagagcttttcaggcttcctccctttcaatcccatgaagtgggtttcctcctgcttcacagacgtgggtgcccacatttcctcttggcctgggttctgagcagaccagcccctgggcctggttggcttctgtattcctcaccatgcttggtaaaggaagtgaaggacaaggttggcagattaggtgggctactgggaaaagcaccttataggacatgtcccctcttttcatttctattagaactttactacattcaaagagtagttaaaacattcagattcttcctctcagttgatctggatttgtagcctaaggaaataatctctaattgtggaaaggctatatcgtgaagctaattctttcagcattgtttatgctggctgcacaatttcactttaagagaagatccaggctgctgatgcctctgtactccattgccaggaggagttatgtctgcaggaccccaggcatagaagaaagagatccccttggctgaagtagacttagaccagaattgggaggcagatctgggtttccacagaagtcattgggaccaaagcccccacaaattataaaatttaagtatgacctggcttgtccctggtgcctgtatctccaaggtgactttgcagggcttgtaggtgttgctccaagatttaggatgtcagggtccaggccaaatagcttcctaactcatcataactaatatggttaacatggaaaattgtgaaacaatttaatgtcaaaacataagggccagcgtggtggctcatgcctgtaatcctagcactttgggaggctagtagggagaatggcttgagctcaggagtttgagaccagcctgggcaacatagtaagacctcgtctcatccaaatatcaaaaagttagtctggcatggtggtgtgcactcaggaagtggaaggaggatcacttgaatccatgagtttgaggatacagtgaactataattgtgccactgcactccagcctgggtgacagaacgaaaccctacctcaaaaaagaaaagaaaagaaacgaaacgaaacatagggagactggctgaatagatgaagttttgtgcaggcttttaaaataatgagtaaaaagattcctttgaaatctgggaaattacaatagaatgtttattgtcatgctggttttttgttttttgttttttgttttttgagacagggtcttgctctgttgcccaggctggagtacagtggagcctagagaagggcaggagagcccttgaccatcacccaggctggcgccaatcctcaggggctgagccactccctctagaaggcctgggctcaggaaatgcccctgagtcagaaacactgtgggacaatattccctgacattttcccaaaaaagggccctaagggaagaggaaagtgcaggtgagcttggagcaaacatgaactctacccattggctcattcaattattcattcatccattcaaaacactattcttgctataatcctaaacaaattaacccaggaacggaagaccaaatacctcatgttctcacttataagtgggagctaagcgttgagcacacatgggcataaatatgggaacagtagacactgtggcctactatgggggagggggagggtgggttaaaaactacctattgggtactatgctcactaccagggtgacaggatccatactccaaacctcagcatcacataatactcccgtataacaaacctgcacatgtactccctgaatgtatctgaaataaaagttgaaggctggatgccgtggctcatgcctgtaatctcagcactttgggaggccaaggtgagaggattgcttgaacccaggagtttgagaccagcctgggcaacaggacaagaccctgtctctactaaaaataaaaaataaaaataaattagccaggcgtggcagcatgtgccagtagtcccagctgcttaggaagctgatgtgggaggatcacttgagcccaggaggttgaggctgcagtgagctatgatcgcgctactgcactccagcctgagctatagagcaagaccttgtctcaaaaattaattaattaattaattaaaatatgagttgacatttcatttaaaatcaaatgttctcatggtgtcctctgtctacagccctgtgatgggacctggggatactgccatgaatgagacagaactagctgccattccaagcttccaaggcagccacacaagttgctcttttgtgaaattttatgatttcctctcaaatattcacatgaattttacattttattttgtaatgtagccatgcttgtttttgtaattttaaaatgatgttttcacaacaatatgcatggacttaatgccactactggattgcacagtcaaaagggctaaaacagcaaatgttatgatatgtatatatgtgtgtgtgtgtatatatatatatatatatatatgtattttagacagagtttcgctcttgttgcccaagctggagtccaatggtgtgatctcggctcaccgcaacctgcacctcccaggttcaagcgattctcctgcctcagcctccaagtagctgggattacaggcgtgtgccaccacgcccagctaattttgtatttttagtagagacggaatttctccatgttggtcaggctggtctcgaactcccgacctcaggtgatctgtctgcctgggcctctcaaagtgctgggttacaggcatgagccaccgtgcccggctggtatgtatatttttattgtggtaaaatatacatacaaaaatcttacaattttaaccattttcgagtgcacaattcagtggcattaagtccattcacattgttgtgcaaccgtgaccacctccaaaactttttcctcttcccaaacagaaattctgtacccattaaacacgaattctgcatccctccctacacccaccccgggagccatcattgtactttctgtttctctatttttattttttatttttttgagacagggtcttgttctattgcccaagctggagtgcagtggtgcaatctcggctcactgcaacctccgcctcctgggttcaagcaattctcctgcctcagcctcccgagtagctggaattacaggtgtgtgccaccacatccagctaattttttgtatttttggctatcattcattcattccacaaatattggctggttatctgccatgtgccaggaactctactagatgatatgaagatgaacaaaactggacagaacccctgccttcatgcccttcctgcccacaggggaggcaggcattgatcatggcatctctgtcctgtggtactaaaggtccagcagcccatgctgggaggcagcatttcaatcagcagtggggattctgcttggtgggctggcccagatcccagtgtcccatcacttttctgagctcggttttctcatctgtgaaatgggagtgatcactctccccatccaaccttttggtgtggcaggatgaggttctctgttcctctcaccctcttctttcctccctcctctgtgagatcagcaaaggcaaattctcatccccattttgcagatgagtagactgaggatcagggaggcagggcagagtcttcaccagaatctttcccaggatggtccctgtccctcactaagtcactggatctgctctccccagcctgggggcactgccacccctccagctgggctcctaccgagtgccagtcaatgtatcctcgtgtctgagggcaaagactagaggcctggcaggactctcccagggtatctcctttttacctgtgtcctcccaccaggcagggttccctgggctccagcaggtgcaggcaggaaccccccagggcactttacttccccagccttcaaaagagttctctgcctatgttgttttctgtccagttggagcacaggtcccacagtcacacagaccaggtcttagttctttgctgatctgtgggaccttagctggggttctctaagtctcattgtcctcacctataaaaccactccctctggttgataaggaaactgtgctcacctggtgggacactgctgcattcaccaactcaggctgccataacaaaacaccatagcctgagtggcttatgcaacagaaatgcatttccttccagttgtggaggctggaagtccaaggtcaaagtgccggtagggctggtttctcctgagatctcttacctgggcttgcagatgtgtcttcacatggctttttctctgtgtgcctgcattcctggcatcctcctcctcttataaggacacccgtcctatgaaccagggcccagcccttatgatgttccttttacctaattacctccttaaaggtcctatctccaaatgcactcaccttgggggttagggcttcaacctacaaattctgagggattgaggaagacacaattcagtccataactactcagcaattaaaaggaacaagccactgatgagcaagagaagccagacacaaaacgtagacatgtatgattccatttatatgaaatgctggaaaagtcagaacgaatctacagtgacagaaagcacagctgtggttgcctggggctgcaggaggggagaattcttgggacaatccgtgggagaactgactccaaagggttccaagggggctttctggggttgatgaaaatgttgcctcttgattgtggtgatggttgcatggaaatatacatttgtcaaaactcattgaactggatgctgaaaatgagtgtgtaaattgtatgcatgtaaactataccttgctaaaataaaatttaaaaccctacctcaaagggttaaaaaaataagactcaagttaggtggttgttaggagtaaatgagttaatgcctgcaaagtgcttagcttggagcctggcatggtgtaagtgtgcaagtaaatggtaaccatggtaacctgaaaacaagacttttgcccagtaagtggggcaagaaagagaaataaacacagaaggcaaggggtggggagtgatgcttctcccatgcccagagcagacaggcaggggctgtgatctcagcctcctggagtcatcgggtcactctcccggcccaggcgaggattcctataatgcctgtcagcatcttttgggccctgggggcagccaactgcaacttagcccctgttcagccctgatcctgttttttttttttttttcattcattcactgaacatgcacattggaccacctagcacaacaaaagacaataatagctgcttctgtttactgaatgatcttatgtgctcagtgcttgacattttgggctgaaccaaatgaaagagccaagattccaccagtttttacccacaaaatgccagtttactgtggttcaacctgatacatgatctctttcattgttatgacaaatctgagagtagatatgattatttccattttgtggctgagaagatggaaattcacagaggtgaagtgcctggcccaaggtcacacagctgtgagtagctggatttgaacacaggtctgactctgaatcccgtatgttacatgttccttgcccttaaggagtaccggtctagtgtagggatgaacacattaaatacggcccccggggtctcgcccactcaccccctgaatccccccaacaggctgccctcagcttttcagacactggacatgagtgttcttggtcttccaatgatgccaaagtcctgccgccctgcaaacagctcctctgcccaccaggacatcttgccttctccggacctgcttctccccggacctcgggggttgtgtggtcagtgctggctggtccctggtgaagctgtacttatgtgtctctgttgccccaggagttgccctcattctgcccatcttgtcctcactccaagcccgccccttcttaaagactccctctgagttcaggttcgtctttaattcacagctcattagtagatcaaagaggacagagacaccctgagtctaagggaccctcaggcagccccatcctcacactgtaacaaggtgcccccttggcaggagacaaggggatctccctggctgctctttgtgaagcaaggagagggggctgggacctggctccaggctcccccatttataacagggccagaggttcagctggcagggctgaggcagaggcattggaaagccgtcagcccctcctccagagc
